United States Patent Application Publication US 2025/0205292 A1 - sequence listing, part 9

SEQ ID NO: 12 - DNA, 2494902 bp, Lactobacillus crispatus
  source 1..2494902: mol_type = genomic DNA
ttgttcgacattaataaattttgggaacactttaatgacgagatgcgtgctcgtttcaacgaagttgcctacaatgcatggttcaaaaatactaaacctatttcatataatggaaaaacacatgaattaaaaattttagttcaaaatcctgtttctaaaggttactgggaaaagaatctatcttctcaattgattcaatctgcctacggttatgccgacatcgagatcttacctgtatttaaaatatctgaagatgcggatattacagaaaggatcgtaacacctgcgccaaagcgtgaagcgcaagttcaacagcctaatttgccagaaaaagaattcactaaagacttgaagttaaacgaaaaatacacttttgataacttcgttcaaggtgagggaaacaagttggccgccggtgctgcacttgctgtagccgacagtcctggtagtttttacaatcctttatttatttttggtggcgttggtttaggtaaaacacacctgatgcaagctgttgggcatcaaatgctagcagagcgacctaacgcaaaagttgtctatatacagagtgaaacttttgttaatgacttcattaattccatcaaaaataaaacgcaggacaaattccgcgaaaaatacagaacttgtgacctgcttttagttgatgatattcaattttttgcaaaaaaagaggggattcaagaggaattcttccatacttttgagacactttataacgatcaaaaacagatcgtaatgactagcgatcggttgcctacagaaatcccagatctatcagagcgtttagtttctcgatttacatggggcttgcaagtcgaaattacgcctcccgatttggaaaccagaatcgctattttgcgacgcaaagctgaaacagaaggttggactatcgatgatggtacgcttaactatattgcatctcaagttgatactaatattagagaacttgaaggggctttagttaaagttcaagcttatgccacaattgaaaaagcagatattgacgttaaccttgcgcgtgaagcattagttgacctcaaattagttcaaaaaaatcgtggattacaaatctctaaaatacaggaggttgtcgcaaactatttccaaacttcaactgctgaattaaagggtaaaaagcgtgtacggcagattgtagttcctcggcaaatagcaatgtatctttctcgtgaattaacagatgccagtttgccaaaaattggtcaagaatttgggggaaaagatcataccactgtcatgcatgcttatgataaaatcgacaagcagatgaaacttgattctgatatcaaaactgctgtctttgacctaaagcaaattttggagcactaaaagttatccactgtggaaaaataaacaagttttacacaagtttttaaccgtaacaagtccgttattttaggcttcttatgagttttcaacagaactcacaggccctactactactaattaattatataattactaataaagagaaatcacacagctattcttgggaggaaaaacatgaagtttacaattaatcgcaatctgtttatcgaaaacctcaataatgtaatgcgggccatctcatcaagagctactattccaattcttagtggaattaagttagacttaacagaagataaacttacgctaaccggtagtgatacagatatttcaattgaaattcaaattccagtcaatgatgatttaaatgtggaatctacaggttctattgttttaccagctagattctttagtgaaatcgtaaaaaaattgcctggtaaagacttctcatttgaagtaaaagaaagttttcaaactcagatcatatctgaaaatagtgaatttacaattaatggtttagatgctaataactatccacgtttaccagaaatttcagatgctgcttcattcactatttctggtaaaactttccgtgaaatcattaatgaaacgcaatttgctacttccaatgatcaaacacgagcaattttaactggggtacgtttcttctttagtccagataaaattaaagctgtcgcaactgattcccaccgtttatctcaaagaacaattgctttagaaaacggacctcaagctgaaactgatttgattattcctggtaaaagtttgcaggaattagctagaatcattggtgaagctgatccagaagttaaagtttgcccaggtgataaccaagctttatttgtaattggcaacttgtccttctattcacgtcttttggacggaaattatccagacactgatcgcttgattccgactgaaaagaccactagtgttgaatttgacatttccgaattatctagtgcccttgaacgtgccagtttgttaactcatgctggccgtaacaacgtggttactttgactttagatgtagaaaatcaatcagctaagttatcaggtaaatctgcggaaattggtaatgttgaagaagatgttagcttcagaaatcttgaaggaaacaatttagagatttccttcaaccctgactatatgcgtgatgcgttaagagcttcagtaacagattctgtaattatgagttttactaagccacttcgtccatttatcattaatccagataaagaagacattgaatttgtgcaattaattacgccagttagaacatattaatcaagtacacaatatttaggtcataaaaagtcgtcaaataaggcgactttttattttgcttttaaacgaaaacgcaaaatattggcgtatatttatttttttaccgtgctagtgtgattaggttattttgaaaaaaagctctgaaaaggcttataagagcgatttagtttgttatttgtgttgaaaactaatataattatataggtataaagcgtattgaaggtgagcattattaagtattttaaagttgacggcgatcatattactttggggcaattcctgaaggaagagagcattatttcatcaggtggacaagctaaatggtacttaaaagataatccagtaactttaaatggtgaacttgaagatcgaagaggcaaaaagatgcatgttggtgatcatatagtggttaatggccaagaatatgagtttcggtagggaagtcaatgtatcttgatcattttactgtacagaattttcgtaatttaaaaaagcttgacgtaaattttgattcaaacgtcaatatttttattggcaaaaatgctcagggcaagaccaatttgctagaggcaatctattttttagcattaacacgttcacataggaccaataatgataaagatttaattggtttcggcggtgagtttaccaatttacttgggcatgtacataaaagccaggtggatcttgatttacgtgttttgatcacccaaaaaggtaaaaaagtatggattaatcgagttgagcaggcgaagttgtctaaatacgtaggtcagctgaatgcgattttattttcaccggaagacctcgagttgatcaagggtgcaccagcactgcggcggagatttatggatcaagaatttggtcaaataaatgcagagtatttatacttcgcaagtaagtatcggcaagttttaattcaaaagaataattatctgaagcagctagctaaaggtaaggcaaaggatcaggtctttttagatgtactttcagatcaactagctggtatcgccgctgaagttgtctttcgacgatttaaatttcttaagtatcttagtcactatgctagcgatgcttatgcacatattagtttaggcagtgagcagctttcaattgcttatcatccatcagtggctgacatccaagctgatgacagtacagaagaaatttatcaaaagattttagcaagttatgcacgaaataaggcaagtgaaattcgcaaggggacaactacttctgggccgcaccgtgatgatattgaatttaaacttgatggtcaaaatgcacatctttatgcttcgcaagggcagcagcgttcaattgcacttagcgtcaagctggcggaaattcaattggtgcatcaactaacagatgagtatcctttactcttgctggatgatgtaatgagcgagttagatcatggtcgacaaagtgcgctacttaattatattcatgggaaaacgcaaacctttattactacgactgacttagaggggatttcctgggaaataattaaaaagccgcgtgtgtatcacattcaatcaggcaaaattagtttggagaaggagaattaaatggctgataattcaaaagaaaatcttgaaaaggtcaaaaaatatgaaaaagaggctgacaagtataatgccagtcaaattcaggttcttggcggtctagaagctgtacgtaagcggccaggtatgtatatcggttcgactagttctcagggattgcaccacttagtgtgggaaattattgataacagtattgatgaacgacttgctggttttgcgaccaagattgaagttacgactaacgaagatggtagtgtcaccgttcaagatgatggacgtgggattcctgtagatattcaagaaaaaacaggtcgtcctgcattagagactgtatttactgtacttcacgccggtggtaaattcggcggtggtggatataaggtttctggtggtttgcacggagttggggcttcagtagttaacgctctgtccactaaacttgatgttaccgtaatgcgtgatggcaaaaagtactttatcgatttcgatcatggccgtgttaaggatgagatgaaacaaattggcacggttccacttgatgaacatgggacgattgttcacttctatccagatccagatattttcacagaaactattgtttttgatgacaagatcttgaagaacagaatccgtgaattggcctttttgaacaagggattaactttaacctttactgacaagcgtaaagacactgccgaaacagatgtgtataagtttgaaggtgggattaaggaatacgttgcctttttgaacaagggacaagaagtattatttgatgatccaatttatgttgaaagcacctataatggcattgatgttgaagtggctttgcaatatacaaatggctataagactactttgatgacttttgccaataatattcacacctatgaaggtgggatgcacgaggccggttttaagactgcgttaacacgtgtggttaatgactatgcacataagtctaagatcttgaaagataaggacgataatctttccggtgaagacattcgtgaaggaatgacagctattgtctcagttaagcaccctagtccgcaatttgaaggtcagactaagaccaagttaggtaattcggatgctagaactgctgtagataaggctttttcagaaacctttagtcgtttcttgatggaaaatccttcagttgggcgcaagatcgtagaaaagggtcaattagccgaacgagctagaactgctgccaagcgtgcacgtgaagtaacaagaaagaaatctggtctggaaattgctaatttaccaggtaagttagccgacaatacaagtaacgatccaagtatttcagaactgtttatcgtcgagggtaactcagccggcggttctgctaagcaaggtagatcacgtttaacacaggctattttgccaatcagaggtaagattttaaatgttgaaaaagcttcgatggatcgaatcttggctaaccaagaaattagatctttattcacagctttaggaacaggctttggtgctgactttgacgtttcaaaagcacgttatcacaaattgattatcatgactgatgccgatgtcgatggtgcccacattagaaccttgctgttgaccttgttctataactatatgcgcccaatgatcgacaagggctatgtttatatcgccaagccacctctataccaagttcgtcaggggaaagtggtcagatatcttgatactgacgaagaattgcatgattacttaggtagcttgcaaccaagtcccaagcctactgtgcaacgttacaaggggttaggtgaaatggacccagagcagttgtgggaaactactatgaatccagaaaatagaagactggatcgggtaagtcctgagtatgctaaagatgctgacgcagtctttgagctcttaatgggaaatgaagtttcaccaagacgtgactttattcaaaagaatgctaaatatgttgaaaacttggatgcataggaggattagatggacgagaatcaaactcaagatcatagaattaaaaacgtcgatctaactagcatgatgcgtagttcatttttggattacgcaatgtcagttattgttgcacgtgctttacctgatgttcgtgatggcttaaagcccgtacaacgtcgtattctttacggtatgagcgagttgggggtaacgcctgataaaccatacaagaagagtgccagaattgttggggaagttatgggtaagtttcacccccatggtgattcctcaatctatcttgctatggcacacatggcacaagatttctcataccgttacatgttagtcgatggtcacggtaacttcggttctgtcgatggtgatgagccagccgcaatgcgttataccgaagcaagaatgagtaaaattgctgtggaaatgttgcgcgatatcaacaaaaacaccattgattggcaaagaaactatgatgataccgaaaatgaaccggttgtcttacctgctagaattcctaacttgcttgttaacggtgctaacgggattgccgttgggatgacaacaaatatcccgccacataacttgactgaagttattagtggtttgcacatgttaatgaaaaatcctgatgctacaaccaaggacttgatgaaagttatcccaggtcccgattttccaactggcggaattattatgggacgtggtggtatctaccgtgcttatgagagtggtaagggtaacattgttgttcgcgccaaaaccaatattgagactgaaaagagcggccgcgagcgcataattgtgagcgaaattccatttatggtaaacaaggctgaattggtgaagaaaattgctgatttggctcgagaaaagactatcgatggaattactggtgtgcgtgatgaatcagaccagacagggatgcggattaccattgatattcgccgtgatgctagtgctagcgttgttttgaataatttattcaagcaaactcaaatgcaggctaactttggtatgaatatggtggctattgttgatggtgcgccacactttttaaccttgaagcaaatgctgcaatattacttggatcaccaagaagatgttgtaactcgcagaacaagattcgagttagctaaggcagaggcaagagcccacatccttgaagggttaagaatcgctctggacaatattgatgaaattgtccacattatccgcaatagtcaatcaagtgacattgctaaagcaactttgattagccgctttggccttgatgataagcaatctcaggctatcttagacatgcgtttggttcgcttgactggcttggagcgcgataaggtagaagctgaatacaaggaattacaagctaaaattgctgactacaaagatattttgtctaagcctgagagaattgaccaaattatctatgacgaattgcttgatattcaaaaacgattcggtgataagcgaagaaccgaaattggtgctagcgaagtcgtttcaattgaagatgaagatttgattgaaaagcaaaatattctgttgacggttacccataacggctatattaagagaatgccaattcaggaatttaagactcaaaaccgtggtggtaaaggtatcaagggaatgggtgtacaagatggcgactttattgagcatttgatttactcaagtacgcacgatctgctcttgttctttactaatgctggtaaggtttactccaagaaagcctatgagattcctgaatacggccgcgcagctaaaggattgccagtagtcaacttattgcaattggaaaagggcgaaaaggtccaaactgtaattaatattccggaaggtgctgacgataattacttattctttgttactaagatgggaactgtaaagcgtacacacgttagcgaattttctaatattagaaacagtggtttaattgccttaactttgaaagatggcgatgaattaagcaatgttttgactactgatggtaagcaaaacatcttaatcgggactcacttgggctacgctgttaccttcaatgaaggcgatgttcgggcaatgggtcgaactgctgctggtgttcgcggaattaacttgcgtgagcatgactatgttgttggttcaggtattttaggtgctgatgaccaagtcttggtaatttctgaaaagggttatggtaaacggactccagcttcagaatatccagttaaaggccgtggcggtaaaggtattaagactgccaatattactgagaagaatggtccattagctggtgtaacaatcattaactcaaataatgatgtgatggtaattactactgacggaattatgattcggtttagaattgatgatgtttcgcaaactggccgtagcaccatgggtgttcgcttgattaaagttagcgatgatagtcaggttgcaagtttaaccgttgttccaactgaggaagaacaagatcaaactggtgacgatgacgactcaaaaaatggataattaattaaaaaaacaaaaaatttgaacttttaaaaaaattatcaaacttttttgcgtaataaataatgagcagtaaaaaatctgctaggatcacgtgaaaacagtttggtaattttttatttatatgctaaaattagaaattgcgagtaatattccattactccttgttcttgattttagcaagaaccatatagtccagaaggaggtgcaatagtcatggcaactacaaagtacgaagtaacttacatcatcaagccagatgttgacgaagacaacaagaaggcagttgtagaaaactacgacaaggttatcgctgataacggtggtactatggtagaatccaaagactggggcaagcgtcgtttcgcatatgaaattgataagtatcgtgaaggtacttaccacattatgactttcactgctgacaacgctgacgcagttaacgaatttagccgtttgtcaaagattgacaacgctatcttacgttcaatgaccgttaagttagataagtaattttaatttattatccgttatgtgatttaggaaaggaaggtacatgagtatgattaatagagttgtacttgttggccgtttaacacgtgatcctgaattacgtactactgggagtggaatctcggttgctacgtttactcttgctgttgaccgtcaatttacaaatagccaaggtgagagaggcgcagatttcgtcagctgtgtaatttggagaaagtcagcagaaaacttctgcaactttacttcaaagggttcattagttggaattgatggccgaattcaaaccagaagttatgataataaagatgggcaaagggtatatgtaaccgaagttgttgttgataacttcgcattgctcgaatcacgcaaggatcgtgaagcccgcggtcaaaatggtggttatacaccaaatagtggaaatgctggcagtcaacctgctaacaatttcccaaataatggcggatcacaaggtaattcacagactaataacaatcaaaataattcacaagatccatttagtggctcaggtgatacgattgatatttctgatgacgatctaccattttaaactaaattaaagaaaggattctagaacatggctcaacaaagaagaggcggccgtcgtcgtcgtaaggttgactacatcgcagctaaccacatcgactacgttgactacaaggatgtcgatctgttgaaacgttttatctcagaaagaggtaagattttaccacgtcgtgttactggcactagtgctaagaaccaacgtaaagtagctaatgcaattaagagagctcgtatcatgggcttgttaccattcgttgctgaagactaatttagatcgaaataaaccaaaaggacaggacacaaggttctgtccttttttcgtataataattaaaaaaattctctcttcgtattgtaccctaagtgtataattttttacggtaagttgaataaataattaaaaaagcccaagtcctttgaatttggacttgagctcaaacaaaaagaccagtagtctgatgttaagaacaaaaaacacattagaagctggtcttttatgaattcaattgtaactgaaatcgcaaatattataaagtctgaagataattatattaagcgtgaaagaaaaataatctgtttcttcttaaacctgattaaggaaatcatggccttggctttagctaaagttgatgatgaaatgattaccaaggttaaagcacagggatatcagattgataagaagaatgagcgctcaatcaatatggcttttggcgaagttaggtatgtcagaagaagatatgtctgcccaggcaaacaagcaaggtatcccttggatgaattaataggctttgacaaatacaagcgctacagtattttagcagtcaaaaacatcttagaagtaagcagcgttgccacttatcgcaatactgctctagcagtcaattgcctgtctggctttaatattagccatatgcaggtgggcaatttggtaaaaatggccgggaaaaatattaaagcgggccaagaagcagattcaagatatgatgccgcaggcactaagaaaaaggtcccagttttgtatcttgaaggcgatggcgtggtgatcaaaggcactaaaagccggttggaatttcatcgctatcaggtctgtgaaggcattgtcaatataagcaagaaacgcagaaagcgaatcaatgccaaggaatttgtttctttaagccgacttgatgcgctgaacgaagccaaggagtacctggccaatacttatgatctttctgatactgtaattcttagcaacgccgatggcggtgctggatatgtcaaaacagacttcgatgacattgtagggctatgcaagcgtcatgagcatttcttggatgtctttcacctaaataagaaaatcaaagaaaggctatattttgcgcctgacctgcaaggcaagctgatttctgctttggaatacaaatacagctatgacaaaactatcctaaccactgcagaaagccgactaattgatgaattgaataccgagctcaatcatgattatctggggcgcctaaagaattatattgatcgtcattgggacgatattaagccgtttaagaaacgaaaactgactgtgactaaagccattggctgctgcgagagcaaccaccgcaagtatacctaccgtgttaaggggcaaggcaagaaatggtcaaaatctggagcagaaggcatgcttaggatcttaagctgcatcaagaatcgagagctggaattttggcttagcagcgagtttgaagattcagaaataactgtattgactgaacaggaattaaaagcagcggcccgtgacagcttaaagaagcgtcatgaagttcatttaggcatccagcatggcgcattaaccgcacaggtagctggcaatagttatttaagcaagctaagcagaaatttaagtcatataaatatttaagaaattaaggttagactaatggtttaaaggctaccgcaaaaacattgacacttactattgtacctactgttttcaatcatgagccggaataaggtataattaacactgatatactatatctattaggaaggatcttcatgaaggattttttacgtaagctagaattgcctgaatttattaaggattcacggctgacagcttctataatcattgcactttctctttcattattgggaagcattattgcgatgattatgaatccattgtttggtttggcaatgcttttagtctttattttgaccgttgcctttgccatctatgggacctatattttagcgggtaatgcaaatagctttgcggttaatttgtcttaccggataaagcgtagtgaacaagaagcaatgattaagatgccgttgggaattttgctttatgattcggatcaccaaattcagtgggttaatccatatctgcaattatatttaaagagtacagatttagtggggcacacaattgaatcagttgaccctgatctgaataagctacttaatgaagcaattgaggcaaaaacagcagaaaatcatctggttgattgggatggtcaccgatttgaaatggtggtccaaaataatttaggcgtaatatatttattggatattacgcgctatgccaaaattgaagataaatataaagctgaacgattggcgattggtcaaattttcatcgataattatgatgagctaagtgaagcaatgcatgatcaagaattgaccagcatgagttcatatgtgcaaaatacattgagtgattatgcgaaaaagtttaacgcatatttaaaacggattgatgaagaccatttcttgatcttgatccatatgcaagaattagctgagatggagaaggacaaattctctgttttagataaggtgcgtcaagaaacgagtagaaacaatacgccacttactttatctatgggaattgcttttgggagtgattctttgtctgaaattgccaaccaggctcaatctaacttggattttgccctaggtcgaggtggagaccaggttgtcttacgtcaacccggtaaagacgcccgcttttatggcggtaagtctaatccgatggaaaagcggactagagttagagcaagaatggtttcacaagcaattagtgaactatttaaagatgccgatcaagtttttgttgttggtcatcagcgtcctgacatggattcagtcggtagtgggattggcgtagtaaaattagctcgtcttcacggagttaaagctaattttgttttagatactaataagacaaactatgatgttggtcgcttggtcaccttaatgcaacagaaaaatcaggataaggatatttttattaaccctgatgtagctttagctcaagttactgacaagtcaatgttggtaatggttgatcattcgaagtattcaattacttactcacgggcactttatgatcgtttgaagaatcgaatcatcgttattgatcaccatagacgaggcgaggaattccctgaaaatccaatgttaacctatgttgaaccatatgcttcttcggcttgtgaattggtcactgaaatgattgaatatcagcagccagctaacggtaagcgagttttgaccgatattgaagctacagcaatgttagctgggattgtggtcgactccaaggaattctcgttgagaacaggaactagaaccttcgatgcggctagctacttacgttcaatcggggctgactcagcagttgtaagcatgctcttgaaagaggatattgatagtttcctcgaacggacgcatttagtagccactttgaagatggtgaagccacatatggccgtattatgtggacctgatgataagattatagatccgatcattacagagcaggcggctgatactgcacttgatttgggaaatgtgggtgctagtttcgcaattacgcggcgcagtgataatacgattggtatttcagctagatcaatgggtaagatcaacgttcaaattattatggaaaaattgggcggtggtggacatctttctaatgcggcaacacagattaaagatgttactattgaagaagcaaaacaaaaattacttgatgcaattgatgaatatgaaaaagaaaatgattagggaggacaaatatgaaagttatttttactcaagatgttagaggtcgaggtaagcgtggacaagttaaggacgtacctgatggctacgcacaaaattacttgattaagcgaggcttggctaaagaagctactaaaggtaacatgaataccttgaagcgtgtagaagctaatgaaaaggctgcttatgaagcagaaaaggccgaagcagaaaagatcaaggcagaacttgaaaaagacgataccgttgttaacttcaaatctaaggctggtactgactcacgtttgtttggttcaatctcaagtaagaagattgtggaaggccttgaaaagcaatacggtatcaaggttgataaacgcaagcttaacttgccagaaccaattaagactttgggctatactaatgttcatgccaaattatttaagggtgttgaagctactattcgcgttcacgttactgaacaagactaataaaaagtggttgtgattgatggataatatcgtttctcaacaaattccgcatgatcgcgatgccgaaagggcagttctgggtgcgatttttatcgatcctgaagcaattgcggatgctagtgcggtagttcagcctgaagatttctatgagcgggctaatcaaattgtctttcaagcgatgttggacttgtctgatcgcggggatgcaattgatacgctgaccttacaggatgaattaaataaaagaaatcagttagaagatattggtggtatcggttatgtttctgaattagcgatggccacaccgacagcagcgcatgttacctattatgccaaaattgtgcataggaaggcgctgcttcgtcgtttaatctctgctagtcagaagattatctctaatgcaatcgatggctctgacgatgtaacagacattctagatgacgctgaaagtgaaattatgaatgtttcgtcagagaatagcacaggcggctttaggaccattaaagagatcgttaattcagcgattaatgatattaataatattccggatgacggaaatatggttactggcttgccgactggttttgcggaattagataagatgacaactggttttcacgatgatgaattgatcattgtagctgctcgtcctggtgtgggtaagacttcatttgccttaaatattgcgcaaaatgtagggctacacactgaaaaaagtgtagctatgttctcactagaaatgagtggagagcaactggttcagaggatgttagcttctgaaggactgattaattcacagcacttgagaactggccagcttgatgaagaagaatggcgtaaattggtagtggcttctgggtcactagcaggtgcgcaaatctttatcgatgatacgcccggaatcaagatgagtgaaattcgtgctaaatcacggcgattagctaaggaaaagggcaatcttggtcttattgtaattgactacttgcagttgattgagggaccacgtagtgagtcacggcaacaagaagtttcagctatttcacgacaattaaaaaagctagctaaggagcttcatgtgcccgtcattgccctttcgcagctatcacggtcagttgagcagagacaggataaacggcctgtactgtccgatattcgtgaatctggatcaattgaacaagatgccgacattgtttctttcttatatcgggatgattattatcgcgatgagcctaaagatggcgaaagtagtggcagtcaagatgaagttggcgcagaagacgataacggtgaagtagaagtcattattgaaaagaaccgttctggtagtcgggggacagttaaattaatgttctctaagccgtttaaccggttttcaaatttggattatgcacatgatcctaatggcaattaagattaatcaagtgtctgggaaaaaactaagtctcagatcatgaaaaaagaacgttgaatttttgtttcaacgctctttttgtatacttttagctccagccttgatattattaaatcatcacaaaataaaaaaggtggaaactaacatgtacaagaattatatcacaggtcaaactgctttaacacttaatctagattttgccattccggccaatcatttggctaatgccatcagctggtttgtagattcaattccagaagatgttttagtaggcaagactgctaaaacgggccgcccagcctatcatccagccatgatgctcaaaatactgctttttgcttactccagaagagttttttctggcagaaagattgagttgatgctggaagaaaatctgccaatgatgatcttggctgaccagcaaaagatttcatatcatactatcaataattttagatcaagcagccatgccaatgaactgattaaaaagagctttatctacttcactaacctgttagaagatgaaggcttaatcaatgaaggtgctgcttttatcgatggtactaagattgaagctgatgctaaccgctatacatttgtctggcgcaaagcggttgaaaagtatcatgaaaagctgaaaggccaggcagttgaactttatgatgaattgattactaaagaagtagtcaaagaaatggaaaaagaaaaagttcaaactagtcaggggctaaaggaattagctcaagaaactgaagcagaaattaacaagctgactaaagagattgagcaggaaaacaaagccattcctggcggttcacctcgaaaagccaagcgacgtggactaaaaaagattctgcaccggctaagaaaagattatgtgccaagaatgcaaaaatatgaagaagccgaagagatctttgccggacgcaacagttattccaaaacagatcatgacgccacctttatgcatatgaaggaagaccacatgaaaaatggtcaattaaagcctggctacaatattcaagcagtcacgaccgatcaatatgtagttgattatgccatctttcctaatccgacagatttcaaaactttggagccggttttggatcaaatgaccgtgttggacaagtttgacaaaatcgtcgccgatgctggctatggcagtgaatacaattattcgatgctggaggaaaaatatccagacaagaagtactttattccctacactatgtatgaaaaagaacagaccaaaaagtataagaatgatccaactaagctaatcaactggtactacaatgaaaaagatgattattacattgatcatcatggcgtcagattcaatttcaaatattacagccagcgtaaggatcgttctactggtcaggtccgtgattttaaggtttatgaggcagacgagttccagctaacgccagaattggaacaattggctaaaacagctagcggccgccagcgccaagttcgctataatcctaactggcaatatttaaaagaaaaagcaaaagaagttctccaaagcgaagaaggcagacacatctatggcatgagaaaatatgatgtagagccagttttcggacatttgaagaacgtatttggcatgcgcagaacgcacctgcgaggtaaagagaaggtcgaaaccgatatcggaattgcctttatgatgatgaatttgaacaaatattgtcaaagaaggtggctgaagggccgatttttattgttaaaaattttaaagagaacaaaaaaacgatcaagattcttaaaaaaagaaatcttgatcgtttttattcatctggaagctagttttttcccagacacttttttgtacttaaataaaacacaaacaatatttgcatagtattgtactataatttatattttatattgaaagtacacttaatatttgttataactaatattgaaaagatcaaattacgaatatactactcatggaggaatagcgagtttatgaagtttaagaaaattttgcttggtgcgtgtgcagttttagcagtcgtttcactagctgcctgctcaaatagtaagaagagttcatcctcatcgaatgaacctaaggaattgaacgttgaatttgtaccaagtacccaagcaaataagatggaagctaaggccaagcctttaggcacattattgcaaaagcaattacacattccagttcacgtaaccgtttctaccgactatagtgggctggttgaagcaatgtcatctaagaaagttgacgtaggctttatgccaccatattcttacatattagctcataaaaagggaattgctgatgttttattgcaagccgaacgttacggctatgatgaaccatccggtaagatgaatcataccttaatgcataagtatcgtggtatgatcgtggttaagaagggctcaaagatcaaatcttggaaagacttaaagggtaaaaagattgcgattggcgatcctagttcttcatcgggctatgtttatccagttgcggaactttacaaaaagggtttgaatgtaaccaaggactgcaaattagttaatgttaagggtgacgatcaagaagtgttatccgttttgaatggggatgttgatgccgcattcgtcttctcagatgcacgtaatattgccgctaaggatgacaagaaagcaatgaccgatgttgtgccaatctactttaccaagtggattccaaacgatactattgcggttagaaaagatatgcctaaaaaattcagagttaaattagctaaggctttcaagaatattgctaagtctaagaagggtaagcaaattatcgaaagcatttataaccattatggttacgttgaagctaaggattccgactttgatggcttacgtcaataccaaaagattgtgaacaaggctaccggtggtaataattaagattaaaaaagcactcactaagtgctttttttgtattcatgctaagatcagttaaaataaataaaacactaaaagcaaaaatgaaaagagaagaaaaaatatgaaaattgctgttttaactgatagctcagcttatttaactaaagaacaacaagaaaaatatcaaatcgatgttttgccaattccaattatttggggcaaaaaagtatatcatgacttagtcgatattggttatgaagaattttatcaaaaactaaatacagcaaaagagctgccaactacttcgcagccttcaatcggtgatcttaagcagaagattgatgaatacgtggcagcaggctacacggatgttattgtaattactctttcaagtgggatttctagctatttctcaaccgttcagagtgttgcggcagaagaagaccgaatcaaggttcatccattcgatagtaaaattacctgtgctggtgaggcggattatgctatgttggcaggccgtttaatcgaggctggagcggatattgatttgatcatgcatgatcttaaggacctgcaaaaaacgatggatgtgcgctttatggtggacgatttgagccatttgaagcgtacaggtcgtttgtctaatgcggcaagttttgttgggacgctgtttaagattaagccgattttatcgatggatgtgcaaaatgaaggccatatttcagcgattgcgaaagagcgtcaatataaacgtgcatacaagcatgtgcaaaatgattttgataatttgactaaaaatatgccgtataagattcaggacacaatttttgattcacttgatcctgagaaaaaacaggcctggcttgatgattaccgagctaagttccctaagtataagtttgatactagtattatcggccctgttgttggggtgcatgtaggtcaaggtacaatgtcgatgatctggtgccgtgatttggatacttattttgatgaaaatggtcagccaatcaagggaattgagtcacaagcagtagtggatccagagtaagcataataccgatatggcaaaaaaatgagaggcactattgattctttaatatcattgctatattattattaataatttaatatggcgatgaatagggatgatcagagtgtcaatcagttctttttttaaaaagttaatagccaaaaataaactcttgtttttagctatggtgattactagtgcttttgcttctttagatggcgtcatttctccttatgttattgggaaaattactaatacactttctcagaaacattttagtgagataccgaaaatcttgttactgtatctgttgatgatgctttttctgaatgttagcttttatctatggcaattttgttggggaaaaattaccaaatcaagtaatgaattattgagatctacagcttttaataattttattgcttcccctagtgaaaagaaaatcactaataccctgaattttatcaatgttaatgttaaacaaattgaaaatcaatgtattgattcaacaattatgcttgtttactgcgttgagcaagccatcgtttcattagtttatattttaagtattaatggcattgcagcaatggttttcttagtttgtgggttaattccatcagttattccacgtttaactcgtaattgggttcagacaggaactaaaaagtggaatagcagttatgaaaactataatcaaaaaacaagtgatgctgtgtatggttttgatactatcagacatgcaaatggtgataatagattcaaaatatttgtccaaaaagcattaatgggagaagaaaagaagtattttttgatgaattttcggcgtaatacttctaattttttagcccaggtctcttattcattatcaatggttatttctttggctgttggtacattctttgtaattaatggtcaaattctagtaggtggtttgatttctctatttttagcatcagatcgtttaactagtccaattatttcgattgttaatattgcaaatcaattgacctctgttagtcctctgctaaaaaataaagctttacaaaaatctaaaaagcaagaatttaataatttagacttcaccaaattaccaaaccaagagaaaataatttttgatcactgcaatttagggtattctaataaagctattttgaagaatattaatttgacagtttctaaaggcaataaagtattgatcatcggtcgttctggtattggtaaatccactctgttcaagacattgcttaatgaaattccattgctaaagggcaaaatactggtagataatagtcttaaccaagctaatttctataccaattttggtattgttagtcaggatacttatatattcgctgaatctttgcgctttaatttaacgcttggaaaagattttcctactcagcaagtaataaatgttttgaaaactgttaaattaagttatttagctaatgaaaaaagcttagacatgcagatcggggagaagggattatcactttcgggtggagaaaaacgaaaactggaaattgcacgagctttattgaatcaaaaatcgattttacttgttgacgaaggactatctggacttgatgaagaaagcaataaacaaatttttgcacttcttcaaagtcttccgcagacagtaattgaaattgaacatgctgttagtccagaagagaaaaatcaatttgatcaaattattgatctaggagctcagtattgatttttttataaataaacaaaaacaattacatacgtatgaaagcctttacacataaagacttttttatttataatattagcagcacgaaaactttttggagaaaaacttacatacagaaaaggatgagaatatggcagaaaagaaatatgtcggcagtatcgaagcaggcggtactaaatttatcgtagctgtgcaagatgttgaaacaggtaaggaagtagcgcgtgatcgtattcctaccactactaacaaggagactttacaaaagactgctgaatttttcaaaaagcaccccgttgatgcattaggaattggtacttttggtccaattgatatcaatcctaactctcggacttatggttacattttggacacgcctaagccaggttggtcaggtacagatgtgaagggcttctttgaaagaaaattaggtattccagttgccatgacgactgacgttaacgcatcatgttatggtgaatatgttgctcgcggtcgcgatgattctaagagctacttctatgcaacagttggtactggcgttggagctggaattgtgcaagcgggtaagttgctcggtttgaataaccacccagaaatggggcacatgttggttcgtcgttatcctggtgatgattatgaaggccattgcccattccataatgatgcttgtgttgaaggcatgtctgctggtccaagtcttgagggcagaactggtatccctggtgaaaaattgtctcgcgataacaaggtcttcacttattctgcgtattacattgctcaaatgctcttcaatgtttacatggctgctcgtccagatgtaatgattgttggcggttcagttttaaatgaagatgatttggttaaggtaagaaagttctttgatgaatttaacaacaattacgttgccacacccgatttgaatgaattaattgtgcgtcctgctgtggctcacaacgggtctgcaactcttggcgattttgaattagctaagaatttgctcaaataaaaaagcatagataaattgaataagcaataaaaaggctcaactcgttaagaaagacgtaaggcgagccttttttgacgtaatttgacctaaatgcgcgtaatattaattctagaaacgtaaccggtttattaagaaaggagcccaactatgaacaaatcagatagtggcttaaaagacaaagttatcggtaaagtgaaagaagtcgaaggtaaaattaccggcgataaatcacgcgaagtccaaggaaaagctcaacaagccaagggcaaagttaaggacaaagccaaaaaattaaaggatgatctggaaaaagaccatcaaatagatgaagattgttaaagactcaggtcgactagcaatagctaaacagaaagcaaataggtgatcctatgttatcatggatctgggttttaatcgttggcgctataataggtctaatagctggtttcataaccggcaagggcggatcaatgggatttctagctaatttaatagcagggctggttggttcaaccttaggccaagcaatctttggttcgtgggggccgcaaatggctgggatggcaatcgtaccatcaatattgggagccgtcatcttggtactagtggtttcctttgtactagggatgcttagaaaaactgaataaaaatagaataagagaagtgtctgggaaaaaactaacccttagatactgaaagacgatcaatccaactcttaatttgagttgcttgaccgtctttttctgtctatttttatttttgaacaaagaaaattggtcttttgaccatcttctgttccaatatttgcttaaattcatcatcatgaaggctattcctatatctgtttcaaccttctttttgcctcttaaatgagttcggcgcatgccaaagacgttcttcaaatgtccaaaaatcggctccacatcatatttcctcatgctgtagatgtgtctgccttcaggactttggagaactgctttggctttttcttttaggtattgccagttaggattatagcgaacctgacgttggcgtccgctcttagtcttggctaagcgttctaattctggcgttagttgaaattcatctgcttcatagaccttaaaatcacgaacctgaccagtcgatcgatctttacgttgactataatatttgaagttgaatctgacgccattttgatcaaggtaataatcatctttttcatcatagaaccagttagccagcttagtcggatcgttgcgatgctttctggtcttttccttttcgtacatggtataaggaatatagtacttcttgtctgaatactcttcttctaacattgaataattatattcgctgccataaccagcatcagcgacaatcttgtcaaacttgtctagtgtcgtcatctgctttaaaaatggttcgaaagttctgaaatcagttggattagggtataaagcaaagtcaaccacatattgatcagtggtggcagcttgaatattgtagcctggcttgagctggccgttcttcatgtgatcttccttcatatgcatgaaagtcgcgtcatgatctgtcttagaatagctgttacgccctgcaaagatttctttcgcctcttcatatttcttcattcgaggaacatagtcttttcttagtttatgaagcagctttttaagaccgcgtcttcttgcttttctaggcgaaccgccagggattgctttgggttcttgctcaatttcttcggtcagcttttcaatctcggcttccgtttcttgtgctagctctgccaaaccttgactggtctggactttctcttttgccattgctttgacgacttctttggcaatcaattcatcataaagctcaaccgcttgacctttgagcttgtcatgaaatttttcaactgccttgcgccaaacaaaagtatagcgattggcgtcagcttcgattttagtgccatcaataaagatcgctccttcattgataaggccctcggcttctaacaaattggtaaagtagaggaagcttttcttaaccagctcattggcatgcttgctggatctaaagttattgatagtatggtaagaaatctgttggtgttcagccaaagccatcatcggcacgttttcttccagcattaattcgatttttctgcctgaaaatactcttctggaataagcaaaaagcaagattttaagcatcatcgctggatgataagctggacgaccggttttagcagtattacccaataagacatcttctggaattgaatcgacaaaccagctaatggtattagccaaatgattatgaggaatagcgaagtctaagttgagtgttaaagctgtttgacctatggtataattttgatacattaagattgccttctttctttttgttttgtggtgattcaataatatcaaggaaggcacttaaagtatagaaaaagaacgatgaaatccattaggaaatcatcgttcttttttcctgtctgagaattagttttttcccagacactttgtgtttcatgtgaaactattttagcttttttcgttcattttctttctcagctaaaaaacgttgcttaatttcttcaggcaaaagactagggaccgtcttgtcataaaattcaaagaatatgggtgccttgttagagtcattgctcttgggatataaggcaaagtcactttcgctaaacggtaagctgatattaccacgtaaagcattgataatctcaccgaacatatgcaaaacataacggcgcgtctcaggctctaatgacatgattacgcgactgaaacggacagtgcctaataatttatgggcagtaatttgaaaaatatcggtaatatttaattcatcaaatgcttggaaaagagcatcccataattcaccacgttgcttttcagggatgctgtggttaaagtcgatgaagaaatgccgcaaagaacgtgcacctgaagtaagtccttctgctagaacaaaactatcacggccaacagaccaacggcgtggatcatgttgctggaccatcggtgcagtgcttttgacgattaaaacgtgttcaggatgatcaagcatggtgccaatgattgaagcttctgggaggtaggtcttcatcttgggtaatgcacgtacaaagccaggtgctttccagacttggtggaaaaagccggggccgtcaaagctaaaggccttgataatacggtcctgcaaatcaggctcagcgacacttaaagcatattcagcgtaattgccacctttagagtgacctgctaaatatattttgtcgtgaggaaattccgcagcaatttcttttaaataatgagcagcaacatcttgcccatagactttaggcatgtagttcatgttcatatcttcgttccagccaattaatgaactgtcagtgccacgatagacaataatacgcgtggtgctagttaaatcgttctagacaatatgccatattataagctaaaatagctatttctagccgttgttgaaaacctactaagctcctggctcgattattctcagcattgtaatagctaagcaaagaaaagtcgctttcgattgttcttctaattgccattaactgatgatcattatgctttttagcacccctcatgtttttacgatatggtgtccaaagcacgtatcccatacgctttagcttggctgctaagtcttttcctaaatagccttcatctcctaaaagataatggttaattggatgagcattgatcatcaattctaccgtctcttttgcatcatgtaccgacgccttagtaactgcgtagtcaagcagatagccatcatcactcactattgcgtggactttgaagccataatagtagatttttttcgtcgctttataaccaatatcggctatgccacggaagatcttaacgtgataattgcgaacaggctgacaaactggaatcggaaaactgtcgataatcaataattctccacctacctttacttcctgattccaaccctgacggatacaacgaattagaggcaagagcattcgagctcgacggttaaaacgagaatgagataagccaacgaagaatttacagaatcttcgttgagattcaattccaatttcagtttgccaaatgagcatcgctaagatagaactatcaggaagcttggtctgatcaacatttttacgatgtttaagtccatcaggcgcataaagcttatacagcgagcgacaaatcacatttaaccgattaaaactaacttgtaaatggtgagaaaaacgattaagcttgagatagttcaattagatcagactcttttctatttaaattacttacaacttgagtctagtctaattggacttttttattaactaaaacgatttaactagcaccacgcgtacaataataattttattgtcagttagtcgaaaagtagcagcggtgaattgcaaaggatatgggtctttttctaggcgattagtccagttaagaatcttaactttgcccaagcgaggtgatttgggcaaaagcagaacttgatcaccagctaaatctttcatttgtacctgaaatgaaggtagtactcgcagtttttcagctacttcgcttagggtgtgtcctttggcagatttgtcgacgggcagataaataatggaggcgaagagagagacatccacactattgaaaggacgctctttaaaagaaagatctccacgccaacgtaaatattcaagtgttccggccataatctcgtcctttctttcacttttagcaataatactattctactagattattgtggcaaaataaaaaatctcaggcgaatgcttgagatctaaacagaattttaaataccaccacgcgtatagctgatgcgcgtaatatctggatacttacgtaagttcatgataattgaattttcgtcaagtttattattgataaccccatcaatgtagaaaactatccgatcatcacttacgtctaaaattttgatagtaatattttcaactttattttctgcaagttcatgtttaattttagacaaaatgtggtgctggttaatagccacaatttgaatgttaaaacgaacatgtggcgttattttgttgataatgacatcatcgtgaaagatcatttgaatgataaacaatagggcggttgataggataccgatgaaatacatgccagcaccaacagccatcccaatggcggcagttgcccaaactccagcggcagtagttaagcctgagacctgttcttttctaactaggattgtacccgcaccaatgaaggaaattcctgtaacgatctgggccgcaattcttgatggatctagtgcaatgtcatgcatgcttaatagatcggtaaatccatatttagatacgatcatgaataaagcagaagcaatcgcaactacgatatgagttctcacacccgcgctttttctctgaatcgcccgctcatagccgattaatgcgccacaaaaagctgcgacaacaattctaagtagccaatctaattcggttgtaattggagctaaagtttgcattatttagtcctcatcctttgtataatcaacaattattatcatttctattttaacgtaaatgcagaaaaattatagtctggggaatttttttgaacttttttcaaaaaagacttgcacagctctcgtctatgtggtttaattaatactgttgtcgggtgagacaacgaagagttgctgacttagctcagttggcagagcacctcactagtaatgaggaggtcggaggttcgaaccctctagtcagcattagttaaacaatttaatagtttttaagtctatcaattaagttcgaaagagcttgatatgataggcttttttgttgtttctagatatttgtgtagatttaaaaatagttatgaatatttagtttcaccacaaaaattgccacacagtttttctagtgtggcatctgtgtggcaaaggttcgattaatgttgtagtggcgggctttattgcttgccatttttttcgttttcaaagtatccatgatttaagaatgactgtcgatactcttttaagatttttatttgatggtctatggcaggaactaacgtatatgcattatttttattgtagaattcatccattaatttagtattcgattccttgtagtccttaatgaaattactatcattttgattcataataatttcttctaactgcatacgaataactaaattaacattattaatcatttcaagatcattggcaccttccaatgattcttcaaattttttatcaaataaaaatttgaatttatctttccaaaaatttattacgtatgatttctttttataatcttcatcatttttagtaaaagaatcagcggtatctttatctccatttatagaaagaaagtgagaaatattatttttcatattactcaattcttcattattatcataatatgctgaaaaaagtaaattaattaacttactctctacttcttcacctctaattccttcgccttttacataagatactggaactttaaatatttctgctaaagctttccatacctcttcatttggaattctgcttcctgcttcgtatcttgctattgttactcgtgtagctgatatgtttttgttctttaaaagattagatagatcttgttgtgtaaaataatttttttctcttagttctttaattcgatttggagtcatattattacctcactaagattaattttatacgattggtacataattagcaaaagtaccaattttggatacaaaagtgttgactacaagaatgaataattgtatattatatgtaaccaaatgtggtacacaaaattataaataaccatttttggaaacaaaaaagaaagagggaatattaaaaatgtccagtaatgtaacaaagcaaggtgaagtactatctaccttcaacgaaagtagtagtaaaagaaccccaattcaatcagcattaacaagaccgttggttgaagcaattggtaagtgttttctattgttgagcggaaccacagaagaagttcaagatcctaatgatgagtctaaaactattccgcgcgcagtatacgaagtaagagttattagctctaaaactagattacctattggaactgtgctaacggtgaaaattaaaggaggtaagagtgtaattactgatgaagagaataagaagttactgttaggcttagagaaaaataaggtagtagcattcgacgatctaagtcattggaactttaacggaaatgagggattatcagcttcaggtatgcgagtattagaagtcagtccgcaagaggctatgaatttatagaaatgaggcggcttatatgaaaataaaaaaattagtcttagataccaaaaacccgttaggcaatcctaacggggtaaaaatggcattaggagtaactttattatcttcaattggtcttgagtataaagttgcacctcaattcataaatgctggtaattataccgcattagcttatccatttttaattaatattatacctctagggtatccatgctggaaatgggttaatctccatatcgttaattataagatctataagcaattgatgaatattgttcattcggaacaattaatagactatggagataaaaaagaaactaccactttcggtgaaagaaaagttgaatatggtgtcaagatcgtctatgaagaaacggcagaaggtacatatattactgtatatcctaatggtataaaacatagcgacgccactcagacgctaaacaataggctagaggaaactttcaacatgaatgttttatcggtagatcatcagctagcttatacgaaatatttattgagaaatgtaaacagacaaagaatggaggtttctaatgataacttctaatttcgtaataaatcttgataagaatacatcattcagttttaaaggtagtggtgggattcttgtcactgggagaagtggctcaggcaagactaataccaccacatatataatgctgaaggcgatgtcccaatgtgattgcggtttatatattattgatgcaaaaagagctgatatgtatggacttcatcaatttttaaaagatggcaagaaggtagtggcaagtacaacaaatcaaatagcacgattgttgcgtgttcttaatgagaacatgagcgcacggtatgagcattttaagaatggaaaatggggacaggatttcgctgaatatggatatagaccatatttattagtcattgatgaagtatctgcgatgttggctggggctggtaagaataagaaagaaataatgggtgaattgcgtcaagttatccttcgtggacgacaagcagggatatttacccttatttcagggcagagaattgatgcaactattttagatcgtgatattaccttacagttaggtacaagaatcgtgatgggacaagcagattcggagacttatcgcatggcttacccaatggtaaatgatattaaagcattaccattagtacctaataagccggggtatggtcttatctattcagatgggcaaaaaattagcaatcctactccatttgtctcaccggatatgtctaacattgatgttccaggggtaattacgaggttagagaataattttgatccatctaaatatattgatgaatcaagctattgggaggtttagtaattgataagttgccagctggcgggcgacagagtcgcacgaatggaatgtccaagcgtgagcgggctggcaacacccaactaataatatgggtgtaacggaaagattattaatcatggaaacgatgaataatattaaaattgatcaacttcgtctaaatattccatatgatgaaatctatcaagtagaaaatagtcaaagtttacccaaagaagttatagtagctgataatctgctgcatctggcatggttgtttaagtctaatacagtgagtcatggacataatggctatacttcttcatataatttcggttcaggagaacaaggcggaaatatttccgtaatgtggaacgagtcaagaaaagatatgggaatactagtcgactttactgcgacaggcaaagcgctatatgaaagccttgctgaattacatggaattcctgttaattggaagaaaataattgaagaattatatgaaaaaatggggcatatatcgaggctagatatagctactgaccttattaattatggtttttcagttaacgaaattattcaaaggttaaagaatgaagaatcatttttcttgaatactcaaggaaataaaatcaatgctaatcgatttaagataattggaagctatagtgaagctcagactctatatatcggtagtagaaaaagtgatgcttttctgagaatttatgataaaaaagttgaacaggatcgagccgatggactctatagaaacttggctagaaactgtaacgattggataagagtagaagcagaatttaaacaccgtttagctaaagaactaggaaaatatattacaacattaactgcagataatatttatccttatttacttggctgtgtactagaacgttggtcattagttgatagggaagaataatgacatatgaaaaattccaatattctaaagaatggaagattttaaaagagttatcgaaaggacaaggacttcaagaactaaaacaagctcaagttgacgcttccctgaatagaaaaattaattggttcttgtatggtggtgccagtggagttattacgttgattaaagaaatttatggtgatgaagcactaaaaaagttttatcaatttttagattattttatttctaatcctgatacgttaggacattactaccactcggacaagataaaggcggatactaaaactattgcagattctacgcaaggcttgaactttggagaatatttagaagacttaaagagagaattagttgagggagataaacagaaaggcaggggctaatatgtttggcacagagttactcaacgctagacaaatagcagaagaattaggtattagctatacttacttttttaaattaattaaaaatgggtgtccttatcatcaacttggagaccaaggacgtaaatattacgttttaaaggaagtacaagagtggctattagtaagtagccaacattaattagaagacgtagcaacttgctacgcttttttaggagaaagctatgtcaattacacaaattaaaacggggaaaaataaaggaaaataccgtgttagaattcaacctactgataatgaaacaggtaaaactattccgattcctagtaaagtaacaaaaactagcagtaagcgtgaagcaaaacaattagaagaacaaatgtgggtgcaatatcgcgcgcataaagaaatgaatttaaatgtattagatcaaccacttgcaaaagctttagatcactatgtagaagaagaaagaagttcggggcgttggtcatcgattactacgtatgataattggaaatatacggttaagcttgtttctcaatatttcggaaagaaaaaagttaaagatatcaaagaaaaagatatgcgtagttttgctagaaattacataagtacacataaagcaactgtggcacctcattcaacgctagatagacagttacaaaatttaaggagttattttgctactttgaaggaatatggtgtcttaaagaatcctattcctatgaagccattaactaagttttttagacgtgatgaaatgaatgcccctgttaagaaatatgttttcactaataatgaaattaatgttcttaaagatagaatttatagagagcttggagtaacaagaataagttattggacaactagaattgctatcttgatagctctagatactggaatgagacctcaagaaattcaggctttaaagtggagtcaaattactaatgatggaagttttaaagtttttagaataaatgactcatggaatgaaaaagagaagcatcttaacggacatttgaaaagtcgaccgcatggagaatctagactaacccttcccctttctgaaccacttttgcagttattgaataagtttcgtcattgtcagttagaacttttaaaggagaatggtttaactaattttaatgatcgaattttattgaacatcacagattatcacttgtgcgcattagggtatccaataactcaaaaaagtatgaatgatatgttgaaacagttgagtaagaaagtaggggttaataatcaaaatttaaatataagtatgtatacttgtcgtcatactgtagcaacaaaattagggaatacaccaggcatgtcttacccttgggcggcaagcagattagggcattctttaaagatgtttatgcggacatatgtacatgttgatgaagatcgaaatgaagaaatgcttagattgatagctaaaagataaaagaaaaatgcaaaaataacttatatttgataaaaaaatgaattaatgtagtaatagcaagaatttgaaaataataaataacaaataatttttaacattttatagattttgaaaaaaaaagagcgtatactcagggcatcataaagagatgtgaaggagaaatcaaaatggttattgtagaacaaaagtttaataaatataatcatacaagcaacatggatgctatggagtacgctgcaggatgttgcacatgtacaacaacaagttgtacaacttcatgtgccgctgtagctgaaagttaatggatagttggcgctgtaaattatattacagtgctttttttaggagtataaatactgttatgtgtctattaagaataaaagacttaaaagttaattttaaggatcaaacagtactggattttagaggtcatgatatagagataaagtcaggagacaaagtagctctaattggaaaaaatggggcaggaaaaagtacactattaaattgtcttttacatgaagtaaaatacactggctgtataaaggagaagtatcatcagtcggatataggagtagtttttcaagaaaatgtatattttaaattcttgaaagtttatgaaatctttgaattagtgtggaataaacctaaaaagttaattttaaaatctaaatttattaagaattttaatttagcaagcattatgaataaatacatttctgacttatctggtggtgaaaaacagagattaacaatagctttggttttttctcaaaataaaaagatttacttactagatgaaataaattccggcttagattatgataacaggcatgaattaagtaaaatcataaataatattactgaagaaaaaacagtaatacaaataagtcattattttgaagaagttgaaaattgggctaataaattgataatccttgatagaggcaagatgatatattttggaagcttatctaagttttattctataaataagcatgattcattaattattataaatgataaaaaaagcctatctagactgacccagaagcctttaaatctttatagtaataaatatattgtatctagtagtattgatgagagacatgatataacaaatttattagagcaacaaaagatagattataaagtggtgccacaaaatttatacacaacttataaattagcattagtaaaacatgaggataggtaaaataatggctagagaaattttattaagtttaaaagcacaacttagagttccaattgctgtatttttttctattttttttccaattattatgatgattatgatgatgacatcttacggtaatttttcattaagaaatggatatcactttatagataagtatttttttattagtactactataggtattctacctctaaccttaattagttttcctattgatataaataatttgcttgaaactaagcattacttacgtttgaaatacttaaatgttgatttaaaaaaattatttttatcaaatattatttcttatttgataattgtatttatttcagttggaataaatttaatagtaggaaaaagtatatataatttaagattacctagtatagagtatttatgttatttttttattcaattattctattgtgcgatagttctacttatatttggcttactgttaagtttaatagtatcagatatcaaagctttaatgcctgtaggaatgactataatgtttatattatttatggttataggtgtttttgtacagtatagctccttaccgaaaattatacgtactatttctagctacataccagtaaaatatttggcaaatgatttctattatatctggattggtcaggctaaatggaatatgccattttttaaatgtaatacgatctggcttatttttctgtgtttgatttgttacataatttatagaaggaagaataatgttacgaagattttcaactagtaaggatttaagaattgggatagagataatagttggaatcactttatcatttatcattaattttataatgatttcaattgggtatgccattacaaatagtgaaaaattaaaagaatattcggtcaattattttggattagtcatatataaaataaagaattatggaaataaaggtataccagtttccaataatatgatgtttatcggaatagttttaacaataatatttgtttttattgtagagtgggttgtatataagagggataagaatggtagagtatgagcttaaaggattatttaatcaaaatacgctttcaacatcagatattagtaataataataattacaataatcaacaattatttgatcatattataagaggaaatgctaattctgagatgctgacatacttacttaatatgaaccatcagcgattgaatgattttaagagtatgcatcaatataattatggaaattttgcatccttaatgaacagtgtagaacagtataacgaaatagaaaatgatgaaactattttgctacctaagccattgagaataaaaaataagttacagcaggttctaaagaaaagaaaaagtgttagaaattatataggcttatcatgtgatttacgagaattgtccacaatattgatgtattcatttggaatctcgggaagaaaagagaattttggtggaatagtcgcaagtatgcgatattacgcttctggaggtgctctatatccaatttcagtgattatatatataaataaggtggatggattgaaaaaggggctgtatttatatcagccaatgtatcattccttattaccactaaatattaaaactcaaatcgatattaataaattatttgtaggaagtaacattgatgttaaaaatagtagcttttttgtattttataaatatgcgattagttctacatatttaaaatatggtgagctatctttagctaatattttgattgaagcgggaatgatggcgcaaaatttttccttagtaactacagcatgtggttttgggtcatgtccaattgcaggatataacaaaagatttattgaagatatttgtaatttagatcatgttaatgagcatataatttttactgaaagttgtgggagaaatgaatagcgatacgattttttttgtaaaaaaagatacacatattaattctaatataaacgaatggatattaagtaagggaataattcataaaagcactttaacaataagtaaaaatgaaagtagtactttgtttgtaagtttattcaagcaattaatacaaaatcaggaaattaaagttagtgaagatgatgaagagtattcagactttaaaaaacttgttcagcttggatttttaggaataagaaataaaaataaaaaagtagcacttattgtggaagaaagtgcaaaaaacttctttgaaaactatttaaaagatgaaaatatatgtgttagctcattagatgagtttataactcaagatacattaaatattttaattgaagaaaaaaataatactaaattaaataaaatagttcaaaactataaaaataaatacaaagatgtagatttgatttttgtttgttctttgtattatgaaaattatttaaaaggaatcaacaagctaactaaattaattagtatcccatataatataggattttatgataataataatatatttgctactagaataatacatggagagactggctgctatcaatgtcttgaaaatcaaatactacaaaaatttgatggatatatcgaagattatgtatcagaaatggattctgaaaaacaagtatttgatataaaaaattatggagtattaatatctataattaagtcagagatagaagaactaaatttatactctgatacagagctacgaggaaatgttcttcatttttatttacctacttatgaatacaattttgataagaatagaattcaaagtgattgctcagtttgttctactataaataatattttatttaaagaacaaaatatgaaagcgtgcaatattttagccgaggttttaggtaatgataaatatcaagaataatttagaatataatttattgcgtcaacggatcttgggtggcgctataactggaatctggaaaaaggatactttctttattggcgaaagttcgtatccggtaatgaattataattatattactgcaaactttactaattttgaaaaattcgcttttcctggctatgttcccccgattaattatcatcttagtggctacggcttatcttataataaagctttatcggcttttctaggtgaaagtacagaaagatattctttttcagtcttatatcaaaacattaagcataatatcatttattctgattatcaaaatcttcagaaaaagtattctaattgttatatagtacctttaaattatattaatatttatttttcaaaagaagataaagaaaattatataactaaaaaagatccaataagatggatagcattaaattcactatttgatattaataaaaaggtactagttccgcttcagttttatattatgtataccaacagtatatttaaaaatgaaaaaagaattgtaaatagtgctacatcaacaggaactgcttcgcaagaaagctttgataaaagtctggaaaatgccatagttgagttcttacaaatagattcttttaatctttggtggtatggaggtctaagaggtaaaaatttaaatattgatacagaaggcttattaaaggaattgttcccaaacaataatagactttggatgtttttaaaaaaatttacggttaattttatagatattagttttgacaaagcaattaatgtagttgtttgcgaaattaccagtaatagtgatagtaaactacctaaatatgtagtaggagttcaaggaggattttgtttaaataagtgtattgaacgatccttttttgaatgtgtaactgttttagaatattgttttactcaaagttgggttgaaggttctaaatttaaaaagatttctacaaatatagatgatttaaatgtaaataatttagacgataatgtattgttttatgctaaaaatggaaagcctaaattaatcaaaaaagagaatattttaagagtgtccaaaaaggttactaatttaaaagatttgcttttgaatttaaagagcatctctaagtatgcaggatatttaaatattacgcctccagaatttagaaatcaaaactttgaaatatgtagagtatttataccagagcttttaccaatttctttaccgtcttatccgccttattatcatccaagatacagtaaaataggaggtattattaataatgtcccccatcctttggcttaaaatagcttttttcatcactttgtttccaggcggaatatatttgataataagaagaatattgtccagccatagaaaaagcataacagtatatttaataaccttggtaattgtagctattgtaaataccattattttaaagatcaattttaataggtatattgaaatcatcttaatattgattattccttttacgtattatttttttgagtatgttataaggtataaaagattcaatatcttaagttttaaggctaataaaacaattatttatgttttagttttttttcctatatttgaagaagttgtttaccgtttctttatatttaaatattgttcggttttaggcttttctggaatacaggctatgatatttgcaacgttatgctttgaattttcgcacatatattatttaggctttaaagctattaataaattatttttttcctttattcaaagtatgttgtttttggtttttcaaagtttattgttaataatatgtttacacataatttttaatttatatgtgtatttacacaaaaaagatatgtataaagttattttttgatattgacttgtattacgtatataacaatatgtgccacacggtttctagaaaaatcctaaagagtgctaattttaaaagcaaaaattgttaagccttttacgcttctagtcagcattagaaatacgtttaagtctttcaaataagttcaatgaagcttgatttgaaaggcttttttgctactttgaactagaatgaaattctttgaaataataaggatttatttgaaattaacacaattcaaacacacagatacgattcatgtgttaagaatgtgcttgaaggaaaattaagagtactaaatatagtgatttaacaggcgttggagcctgttttttttgtgtttggttagggcattttgtttaaattaaattcagtggatttttgtgcaaaaaaatagccatattgtagggttatacatattgactattttctattattaaaattatttcaattcagccacaaacctaattccttgataagaaggaaacttgtaattatcccatgaaaaataagtgtctggaaattagttctttctatttaatctcaatgctatttcaagttagctattaatctgtatcctaagaatccattgctagattttggattccaagcaatacctacaccaatttttgtatattgaccagataaaagaatgtctctatgtccccaattagatcctgcatcatgataaatgaaattatttaagcaaatttttgcttgtgtagatggggtatcagtattatcaactgcacctccagcaagcacttctgcgtattgagtgcggcttccgtctggccttgtatggctaaaacttgtatttgcttcggtagctctagtccttgcatattcttgcagagaagtatcaagtgttaaagaatttagtccctttgattgacgtaattgatttaattgcgcaataaattcttgttctaatttggtagcaaaatcagaatccttaatgtttgtatattcattattgggttttgtatttgtggtttcattatgcttaataaaattgcttgaattagcactttgagtatttgtttcatcggatgtacttttagtaatagcagatgttttagaagtgtcaggttctgaaactttgtgagttaattctgaactaatccatttgttagttccaactttgtaccatgttttaccacggctatccttcttttctgcataaacatataagtattttttaccatgaattattttagtgcggtaagcttttacacttctgcctttcttgagtgttcttgctcctttaatacgcttgcctttatagttgtaaacataagcattgtgagtaagttttacgctgctagtgcttgcttctactacattggcttgttcgttgccagcaacaactgtagctgaaagcaatagagctgatgaaagcgtaatggttgatagtaatttagtaacgtttttcttttgtaacatggtagttacctcctatattccttatttcagattagcaataagactgtaccctaaaaatccgttacttaatacgggatcgaaagcaaatccaactccaatttttgtatattgactagataaaagaatgtctctatgtccccaattagatcctgcatcatgatagatgaagcttctcaattgttggctggcttcttgctctggtgtacttgtgtcgttaactgttcctcctgcaagtacttctgcatattgagttctacttccatcgggtctaatatggtcaaatttagtattggcttcattagctctggttactgcataagattgaagtgtattatctatgcttaatggcgctaacccattggatctacgtaattcatttaattgagttacaaaagattgttcagtttcatttgcaaagtttgagtttatgatatttgaatacgtctgttcatttgaagccgaattattatcttgttgagtaatactttgtgaatctgctttttgacagtttttggaactatttctttttgtataaaatttatcagtgtcagtagcaagtatccatttgttatcaccaattttataccaaattttatcgttaactttttcttgagcataaacttttacagattgtccgactccaatgtattcgccagtaggtgattgattgggagctttatatgtttcacccaatccattatctgtaatttttgcagtgaacaaataatttgattttgtgttttgcacatttgcgagcctgatatagtgatgactaccaatgtataaatattttgtgccacgtattttcttagtgcgataggcttttacatatttgccttttttgagtaatttaacacctctaatacggttgcctttgtagttatagacataagcattatgcgtaagtcttacatttttagtgcttgcttccactacattagcttgttcgttacttgtaacaactgtagctgaaagcaatagagtggatgaaagtgtaatggtcgatagtaatttaacaacttttttcttttgtaacatattagttacctcctacggatattcattatttcaatttctaaattaatgatacatgatgtgaaaatgcatttcactgctgtttttctttgctggaattatatttatctctcgtaaatttataaaaaagtaaaagattgaaaagttaggtgcatcatttaatacaaaatataaactgaaatagattctcgttgaatttggaaactgtcaaatcttttgtgtaaatagttctttctcgtaaattgattttttaattatttatttaatcaaagtaggattctaaggtgtcctgaacctgaccaaagcctttatgaattcgattgaaataacggtcattgtagctcattgcctgaatgccaataaaagcatcaagcgactgttcagttggaaactctgccttaggcttagctttgcgcttgatcacattgttaaatgattcaatcatgttagtcgaataaattgaagctctgatctgcttgggatagttataaaagaccagcagatctggttctatgtctttcaagcttctgataacatggctgtaaaccttgccccatttggtatagaagtcatgcaggacagctgtggcttcttctttgtttgtctgttgatgcacctgtttgaattcgttcatgatcttttcacgatcgtcgacgcgtactttagcgcagatattgcgcatgacatgaaccaaacagcgttgaaaatgagctttaggataagtcctggccaaggctgttttcatgccaacaacaccatcagaaagaaaaagctcaacttgctttaagcctcgggatttcatgttttgaagcatatctgtccagacttcaatgttctcgctaggcgcaatgcagtagtcaatgacctccttgtgcccattaggcttgatgccaatggcaatatagactgcttcacgctcaaatgtttctcggcgcaaaggaaggtatgtcgcatccaaatagacgcagaaaaacttgtcgcttagcttgcgtttgtggtaagcctcaacctttggaatcatctgcttggaaatatttgatacctgagctggactgtaatggctgccatacatcttttcaattagatcggctatttccctggtggtcacgcccttggagtaaagcttgataatcatgctttccaagatatccgagtgctgcttgtagtcaggcagcgtgtgctgatgaaattgaccgttgcgatcccggggcacttgcacttcaattgggccaaattgcgtatcaactttgcggaaataagcaccatttctagagttgccagtattccagccatttctggcatagggatcatagcccagaaaggcagtcaattcagcttctaacaagttattaacagcctgttgtagctctttgcgcaataaatcatttattttgtctggattgaatagagcttgagcaaaatctttggtaaaatcattcatgaaggagttcttctttctgtatgtgtttttttgttcaaaccaatcatacgagaaaggaactcctttttctaatgtttaaagaaataaatttaaggaatcattcatccttacacaaactattttacagtctcttaatttgacaagcaatatacagaaattatcaataaaaagtacgttttgctataccttttcataaacctgactacaatgagagttgaagaaggcgtttttgtatgacaaaagaatatgaaaaagaagtcaaagaagcagaaagcgtattggaggaccaaaagttaactgatagtgagatttcacaagaattgatttccaaagataatccaactgaaaatgtaaaaccatctgagattgatttcttgcgtaaaaagccaaatttgacaacgcaaattgatttcactttgttagctgatcttgctgggttatccaaggaagctaaggcagaagcggctgtatagataaaaattttacgtagaaaaaagaccggtttgaaccgatctttatcttataaaaatttactttaggagcgtttgtgaaacttagctactccccaactgattagatagaaagtcgaaatcaaaatgaattgaatttttaattctaaaatgaatagtggaaagtaaaataaaacggaaaacaatagaataatagcgtaaattccttcgaatgttagaaataatctgtttctttttctatttttaagtgttgctagtatcattttttcattcacaaagatccctcctaaaaattatgaaattaagaccaacttaaataaggaatagtccatcggataggaacacctaggagccaatgtccggagctgagaaaagtgttttttaacacaacggtagtaacaattgcaataactgcgagtactaccaataagattagtaatgtactttgtttaatttttgacatgattaatgcatcctcctaatattttttaaacttctattattttgctgggataatgaccggtaattgccaccacattactgtagcctcctcccttttttaatcatttagtcggtttggttaaatactactccttagtgactagaacagattaattttgtatcacatagtttacaaattatttgggccaagttttaattaaatcttgataaccatatttttgtacttcatttctaattttttgcgcttcctctttattgtttaaaaataaattctttaaatataaagcagcaatcttataaagcaaaaaatgtatggttggttttgattccatgatgtagtcaattatttttggaacatgcattaattgaagtgattttttagaaagttttctattatagcaaaccgctagataattctcgaagacacgcaagtatctttcttgttctaattcggagatatttttattgcttttcatctcgttaagtagtctattgataaaaaatgcaagggtatcttgttcccagagcggcattgtattagtaaaaagtcgcagtaattcaggattagtcatccagttttgtccttcgttaaattcaatgaatagatctttttttattttgggatcgatttgatttaatttattttttaaatatgctacagaaatcatagctcttaattttaaaatcttagagtgagattgtgacagaatttcttgatagcatgattcaatttcatcaatttttcctacattgaaggcttgttccattttattatttaaatctgattcaatctttttttgctttgaagtataggttgctcgcaataattggtaaaagtaagtaatatcaacatcatgttcaaaaagaatcgcggctaatttatctgcactaattctgctttttcccgcttctactttcgcataaaaaggccgagtaacaatgttagcagccatttctttttgagtgaggtctagattttgtctaatttttcgtagtgcttgtccaatagtcataaaaaatcctttactctaaaatattttcttctctacgatatatgattattataaatgatgaaaatataagcggataaattaaagagaactatggatatcggaacggcattaagacatttgagagatgatctaggtttgacacaaaagcaaatgattcaggggacgaaaataactgttagtcactattctaaattagagaagggacaaaacaggatatttatcgaaaacctagtcgagatattgaagcaacgaaatatttctttatcatattttgttgatcactatcttaatgatgaaaatagtgaaaaagaagtaaattattcagaaatattaaatattgctttttacgaaaaagataagatcgctgctgaagaaataaaacgacaaattttttcagataagagttctagcaatgaattgagagatagagcaacattaattgtggatatgatagacaaccagggacagagtaatgttgatgctcgaatcattaattctattttcaaacatgacaactggactcagtatgacgaggcaataatattattgggtaatattattagaactagtaatgtattaaatatgagtcctttggtattgactctaattagaaaatataaagatctagataaagaaaaaatcgaaaaacaaagaaggttagcaacggttggaattaattatttatttaattttcgaaagttaagtaaagagtttaataaaactgtgctaaaaattataagctggattaaaacaacatcgattgttcctgagttaggcattattcgagaattaaatgcatattttttagcagtttatgaaggaaacatttctgtctcaactaatatcaaaaatgtccttaaaatatcaggttatcaaaatcttgctaatgatttacctaattaatcccctgagaggggattgagttgctgtggaatgagaagtagataaaatcatagttaattaaatatgaaagagaggcatagtaatttgattattgttagttatccagttttacctgaataactctgagttcatacagtacgaggagatataaattatgaaaaaaagattttgttaagcctaagtttagtagtattaggaaatactttgttttttaattcgagtgtagcttctgcagcgactaataatagatattccgtaaataatacaattcgtcaggcacctaatactggcgatgttcctggtggatggggcattactcctggtcatacacattggggctaagtgatagaagcgatgaatgaattttcattgctctttttattttgggatgcgaattttatgaagaaaagtaaaatcatatttttaatagagcttgtattaaatattattgctgctgtttttctagtaataaataattcattcaaaaatttattagatgtaggcgttgtatttttactacttctattgcttatttggaattttttaagaagaaaaattgagattagtttaaaactatcatggctcaatcttatgatattaccagcaatttttacttattgcttaaatactgtagctaatgttttattggtaaaatatcctgttaaaagtgttttaatagctagaatttatagtttgttattcttagtttatttgcttccggtagtaattactaatgcgggattggttaagaataagtatgctagagtttttattgcaatgtattatattgtgctattactttttagcgaaaacttacatatgaatgactacttatcatcctttgtaaattggtctcactctgaaattcttaatgggttagcgttaattccaatcatattttgcttatttaaaagttgggatattcgagcaaagcttaatcttaaatttaggcgatattcaaatatacagttaatagttttattagtagctgtattctttgctgcttggtattccttctttcatagctatgtttatattgcaccaactttttcgcaattattttggaattgggacttctcggaaattatcccaactgaacgagctgttttatggagtttaggagcgattttattcgaagaaggattccggtatctattaataattgtattgcttgaagtttttaaagtgcaaaggggtcaaattgactattttcttgagtgcgctattttttggattgatacattatgccggactacttgaccaaggcccaatatttataatttcaacgcaagcaatttttgcttttggttatggctgctttttggcgacactgtacttatattctggaaaattctggttagtattgctttcacatttttcattagatcttattgcattctcgctttctgcaggtggtggcggaatactatcatggtatggcaataatgatctcttgagtaatggtttgagcatggtttttgctttagttatgacattgattatgtttttaggtaaacaaaggaaaattatgcaagaaaatgctgctagattaattaatgcatgatgcatttaagatggtcgaaagatcatcttttttatgcaataaagtgtcatatataattgacacctactataaaagttgctattattttaaaaacgtcacatataaatgacatctaactagatgaataaagaagaattcaatgaatcgagtaagggaatatcgtaagcaaaagcaaatatcacaaatggagcttgctagacgaataggggtggcaaggcaaaccattaatttgattgagaatgataagtataatccatcgttagaattatgcctaaacttggcgcatgcattaggaacggatttgaatactttgttttgggatggggatgaagcaaaatgagacgagaaagtttatggcttaagtttgtcagatattggtatggcattgatagtaaattagacgagcggcaattagcagaggttgaacgaatcggtaataatgcctatgtaatctctggtatagtggaactgatcttactggttatcacgctaattatggcattgactattaaaagtgagctggctttgtggtttttacctttggcgattgcaattatgatgctgatgatgagtgcttatacttatttgacaatgcgaaaatttaaaatattctctgtcgaaattacagcagatgaacgccccaaagcaattcgtagaatatggataaaggctataatagcgggaataattggtgcagtttttggtacattaggtagcgcgctaggagcttcttctgtgcaaaataatctagtaaatgtgcttgatttttggccacaaggtttatggctaggcgtatgttgcggtgctggtagtgcgattggaagagtgcaacgattgaaagtaattaaagaagacgaataagcgaatcgaaagtagtcgatccgctttttttgctgaaaaactatataattaaagtaacaataaaatttacagcaaggcaaaaaggatgaaaaaacaaaataagactggctcaattggcgtagtgggtgccacggccatcggtgttggtggcatgatgggagcaggcctatatacattgctcggcttggccgccaactctgctggtgtttggctgccagtatcatttctaattggaggcattgtggccgcattttcagtttattcgtattcaaagttaggaatgaagtatccagatcgaggcggtgccgctaagtttttgctaaaagaattcggagatggcctgctagctggtgggatgaacgtcttccagtatatcggctggattatcgccatggcgttatatgcgaccggatttgcggaatatgcctgccaactattgggaaaatcaagctcaggctggctaggtaaggcaatcagtatcggaattgtcatcgtggttgtggcaattaatattatgggttcaaagcaagtggcacgtgcgcaaacggcaattattgcgtttgaattgttaatcttactgtcttttgtagcggtaggtttaactaagctgcatgtgccgacaattactagttcaaatagcggcaatattgtaggtatcctatctgctgcgggtttactttacgtaacttatgaaggttttggcgtagttactaacgctgcagggagtatggtaaatcctaaaaagcagttgccacaagcgctgttcttttcattagggatcgtcatggtgatttacattgtagctagtgtagtcgtggtgatgaccttaggcgttcaaggcgcagtagctaatcaaggccacgttttggcaacggctggtaagctagtattaggcaactggggtctgttcatcacttcactgattgtctgcatcttcgttgtgattttcccattatcagctgttggtgagatggccagcctagcctttttattggtgtatgccatggttaacttaggccacttgcgcattgcaggacaaactggggccaagcgctggattttgatttgctctgttgtattgaatctagctttgtttgctttgttgtttattcagacaattctcaaccacgaaactttaacttggatttcagtaattgctttgttaattattagttttttagttgaacttgcttggcgaaaaaagaataaacgcaacctgcattgattaggaaaaaaatagtaatttatgatacaaaaagtcgacttttgttccacttattgggtacaaaagtcggctttttgtttttttcgttgtcaaaacaatatctttaatattttaattcagatatactctctttgatcaagtttgaagtgagggaaaatgaatgaaaaagttattgatcggaagcgcagtcttagctgccttattaattaaagaaaatatcgcagtaaatgcggcaatagagcaaaacgaaacaacgcctaagattgcagttactgacaaaaaagagaagccaaaagaccagtctgataatagttttgcaggtcattatgaccaagagacaaattttattacctgggaaataaggctgaatcccaagaaagaaaaatatactggtgatttgaagttggaaaatttaattccagaaggcttagttctagatccagatacgattgaagtaattaagaatgataattttattcaaaattctagtttagttaaattgaagaaaaacaaattaacagctgaatttcctgctaagaagtattcagagagcacaattttgattaagtatcgaaccaaggtggaagcagagcctaatgagcctaattatcttcgggtgagtcagtcctttactttgggcgatgatcgagttcaagaatacgagcaagaaattaaatacgatcgaagtaataagaattttaacattgaagcgccacataaatctacgtttagagatgataatcaaatttcgttaattaaaaaatctaaaagtaatgaagaacgctctgaagattggcttaaacgtctagcagagctgattattaataaaaaagaaactacttcagataaaggaggtgaaaaagttcaaggacaggtcaaagatcaaaagcagcaagcttccccagaaaatacaaacctttcacgcactccaactgtcaaaggcttgactggttttgatactaaggctaacgaggtaaaatccacagctaaaatagattctgattcagtaaaaactactctagataaagacgagattaaggacaatgcaagtactatctcgcctaagtcgcaaaaacacgatactcatgtcacactccctaaaagtgacacatcagaaactaaggcaaaattacctaaagctggtgaaactgccggtgttatgctcagcgtatttggcataattttaataattgcagggtggacagttcgaacaaaattcttaaaataatctatatttgtactaaaatacggattttcaatagccaaaatagactctttcacgtattatttagatagataaacttgtatcatgaaagagaaacaaacatgccgtacactatttcagaaattattgttttattttttacttattcagttatcggctggctttgggaaaccttttattgttcgatcaaagaccaccattatgattatcggggatttctgtttggtccttactgccccgtatatgggttcgccgttactacaattttaatttgtaccaaagacgtgcgagataacctgctccttttatttatagtagggactatcgttgccactattttcgaatttgtggctagttggctattagagacaatctttcacatgaagctttggaattattcaaaattatggggtaacattcaaggtcgagtggccccaatgatttcattattttggggcgttggtgtagttttattagtaaaatttattcagccaatcattcagaagctcattaataatgaagaaaagataactcatggctggctagctgtgggtattaccattgttatgggtattgacttagtattaacagtaatcagtgtcgagagattccatactacaactaagatgtgggatgtgcatgttaaccactttattgagcgagttagaactaaagtagaaagtcatatgcctgagaaaggaaaattgcgggttggtgattggcaccactcagtgatgcagcactatgatgaattacaaccgcaacgattaagctggaatcataagcgctacttgaagagctttccaaaattaaaagttactgatgctcctaagttcatggaaattaagaaagaagtcttgaagaaagaaagctaactaacataatcttattttgtgggattgaaaaaagtgtctgggaaaaaaatagcttccagatgaataaaaacgatcaagatttccttttttaagaatcttgatcgtttttttgttctctttaaaatttttaacaataaaaatcggcccttcagccaccttctttgacaatatttgttcaaattcatcatcataaaggcaattccgatatcggtttcgaccttctctttacctcgcaggtgcgttctgcgcatgccaaatacgttcttcaaatgtccgaaaactggctctacatcatattttctcatgccatagatgtgtctgccttcttcgctttggagaacttcttttgctttttcttttaaatattgccagttaggattatagcgaacttggcgctggcggccgctagctgttttagccaattgttccaattctggcgttagctggaactcgtctgcctcataaaccttaaaatcacggacctgaccagtagaacgatccttgcgctggctgtaatatttgaaattgaatctgacgccatgatgatcaatgtaataatcatctttttcattgtagtaccagttgattagcttagttggatcattcttatactttttggtctgttctttttcatacatagtgtagggaataaagtacttcttgtctggatatttttcctccagcatcgaataattgtattcactgccatagccagcatcggcgacgattttgtcaaacttgtccaacacggtcatttgatccaaaaccggctccaaagttttgaaatctgtcggattaggaaagatggcataatcaactacatattgatcggtcgtgactgcttgaatattgtagccaggctttaattgaccatttttcatgtggtcttccttcatatgcataaaggtggcgtcatgatctgttttggaataactgttgcgtccggcaaagatctcttcggcttcttcatatttttgcattcttggcacataatcttttcttagccggtgcagaatcttttttagtccacgtcgcttggcttttcgaggtgaaccgccaggaatggctttgttttcctgctcaatctctttagtcagcttgttaatttctgcttcagtttcttgagctaattcctttagcccctgactagtttgaactttttctttttccatttctttgactacttctttagtaatcaattcatcataaagttcaactgcctggcctttcagcttttcatgatacttttcaaccgctttgcgccagacaaatgtatagcggttagcatcagcttcaatcttagtaccatcgataaaagcagcaccttcattgattaagccttcatcttctaacaggttagtgaagtagataaagctctttttaatcagttcattggcatggctgcttgatctaaaattattgatagtatgatatgaaatcttttgctggtcagccaagatcatcattggcagattttcttccagcatcaactcaatctttctgccagaaaaaactcttctggagtaagcaaaaagcagtattttgagcatcatggctggatgataggctgggcggcccgttttagcagtcttgcctactaaaacatcttctggaattgaatctacaaaccagctgatgacattagccaaatgattggccggaatggcaaaatctagattaagtgttaaagcagtttgacctgtgatataattcttgtacatgttagtttccaccttttttattttgtgatgatttaataatatcaaggctggagctaaaagtatacaaaaagagcgttgaaacaaaaattcaacgttcttttttcatgatctgagacttagttttttcccagacactttttcttatccattaattctatttggttcacgttttttactttttatttcggtgtagttatctaaaacgttggcatagcgtccaagggtgaaaaggtaatcagataatcgattgaggtattttaatacgtcatctgataattcctgttcatttaaacttaatttgaccaatataatagcaacaccatcaactcctgaaactactgaagaagaacatctgacagtaaaagatcatgtgggttcatcaactttaagaagaggattaccacaaactggtgaaaagaaatctactttgaatgcaggctttgcccttgctggcataggcttggctttgcttgcagggatgttgtttgatcctaaaaagaagcactaatactgaataagaattaagttcgttaaagatcgaatcattttgggttcgatcttttttagtaacaaaatttaaaaaatcccaccttcgtgaataattgaatactttacgcgtggtgctagttaaatctttctagacaataagccaaattataagctaaaattgcaatttccaaccggctttgaaagcctatcagactacgtgctcgattgttctcggcattgtaataggtcagaagcgaaaagtcgctttcaattgttctgcgaatagccatcaattgatgatcattgtgctttttagctcctgtcatatttttacgatatggtgtccaaagttcataacccatttgttttagctgttgatgcagttctttgcctaaatagccttcgtcgccaagaagatagtaattagatggatgggcattttccagcagttcaactgtctccttggcatcatgaactgatgcttttgttacgacataatcaagaatgtaaccgtcatcgctaacaatggcatgaactttgaaaccatagaagtaaattttcttggtggccttataaccaatgttggcataaccgcgaaaaattttagcacgatagttgcgaattggttggcaaacaggtaccggaaagctgtcaatgatcaagaaatgtccattcaggtcaacctttttattcatttcttgccgtatctgataaatcaattgcaatagctgacgtgaacgtcgattaaaacgtgagtgtgataaacaattgaaacattcacagaatcttctttgtgattcaattcctgtcttagcttgccagataagtaaagccaaaatcagactgtccgtagttttaatttgatcaatatttcgccgatgagtaaactcagccggtgcatacaaacgataccagtgccgacaaattatcactaaatctttaaaactaacttgtaaatggtggctaaaacgcttaagcttaaggcagttcaatcagatcaggctcttttctattattatacaagttgagtctaacaagattggacttttttattaactaaaacgatttaactagcaccacgcgtaatactttatatatttcaatcgtccactttagtgggattgtattaattcaggatgatctttttgaatttcctgtttttgaagggcagaccaagtccatggaagagttttttagtcgcctagaaactataggcaaggcttggcataaagcctatgataccattgattccgatacagatagagtcattaagagaactaaaatggatgctcgtactacgttagacctactagaacatctatcacctgtacagttctcttgaagagaaaaagaatatcagcacgtcaccagtatggttcttagactatgatcaaaaaatttattgtactgatgatgccatcattggtcagatgcttcaaaccattaatcatgacattacccgacgcagcagtcgtagcttattacactggaaaattcttaaacaaaattgttccagaaatttttatttttgatggatattattttttgcttggttctaagcgattttatttatcaaagttaatagttctatgttatattataagtgttataataatgtaaaaattattaagcattgaaatatagtgcattatgatacgaggagaaagatcatgttagaaagagtcccaaaatatacactaagaaaactgtcagttggcttggcctcagtgatgattggatcaggaatactgatgaactctccaaaggtacttgctgatactattaacccaaatgaaggtactagtactgctgttcaaccttctagtcaagataaagataatagtgagccaagtactcaatctggtgctactcaagatgaaaacattgattctaacgcagctgttcaagagagaagcgacaactcagttactgaaccagcaaccacaactaatgctgaagaaaaagtagtggcaacaaatacccaagatactacgcaagataaagacaagcagacaaatgcgaatgaaactacgcaaaatactaccaatgtcgacaaaaaagatactgaagtaacgccgactaacgacgcaacaacagctacaccgaagacaaccgccaaggttaacgcaccggctgcaccaacagcaatgaaggcagcagctactgctgaaacaccagatccaacggttccagataactcagctaatactgctattatcaatgacaagaatagtttggaaaaaatttggcttgaaacatctactgcgcgggcccaggtctacactaccgttaagggaactgatcaaaaaatctatgtcagttcctatgcagaattcggtaagcgacttaattcattaatttttactaatcgctttgatccaaatagtctagaattacacattgaatatcaggtgttaaaggatagggttcaaaatttcattgtaaattggggagactggctccgactagataccagtagaattggtaaagatggtctaactttcactacagatacaggtgaaaaagtagcctatacgttaacaccaggatggggggaagtacaaaacctatgatgaatggcttagtgaaggccaagatatgagtaagataaatgctcttaaaattggcaacaatttaaaggccgggactaacttcgtattaaccgttcccctaaaatatattggtagaactgatggcacaaagcaatttaacaatgttcaagttgtagattacgggcagccaaatgctaatatggtgttcgattttattgaattacatccagagcaaatcgatactccagaagctccaactactgataaagagtcagttactaccggtatctataacaatccgttagctactgctacagactggtataaaacggagcatggtgaatatgttgcatactatacagctaaagggaaagatggtaagacctatgtaactggatatgtggctgccaatggtaagtctgagtcgattatcaatgttgatcagattgatctaaataccttggaataccatatgatttaccgtaatggtgacgaagaagtagcggccggtatttcagcaagctttgctgatggtaagactctagtggttgatgctagtcgtataggtgctgatggtatccgtttgaagagtcaacagggttggtcttataacaacgggggttatagagagaatactagtgggagactctattatagttgggaagattttcttaagaaccataacggatcggtagataacctcgttggcatcaatatgaatgcatccgctttcaagccgggcgatacaattgaagtagttgttcctgttaggtatattgggaaactttctgatcaagttcaatccttagaatttaaatctgaagctagaaaagatgtttcggttaaactctacttcacaactgtgcgcaaggacttaagccaggttaagcaggtagtcttgcttccgactgagttcatgggagaacaacctggtcaatcaaactggaagctggttaaggaaattgaaaaagatatgccaaatgggtgggaggccattaaaattagtaacttcccaacctataagggatcattcaatatggattcactaccaaaaggggacttaccatcggttgtttatggctctgcgcaatactttgttgacctccaagaaattcagaaaatttttgctaaccatggttacacggtcaagtatgctaacaacaacggtaaagctcaggaaatgccattctatggatacgttaccctgccactggcccttattgatggtggtggtaaacctgttgccccatctatctggacaatccaagttcaagctgtgcctgctattattttaaataaagatcaacactatgtggcagatccgaatgctaagccatgggacaccacttcaatgattgatgagatttatgctgctgatgacgcaggacagcggaagacgcgcgatcaactagaaaagttgccaaagacggacgtggatattagttatgaataccaagctccaggggctgctacagctgctccggttgataaggtcgacttgactaaggcgggggtatacactgtcacttacagtcatacttatgctgatgggcgagtagttaaggatagtcgcaaggtttatgttgatgatgttaagcaagaaaccaaggacattactcgaacaattattgtccacgagccaaacggaactgaccaaacagttatccaaaaagcaacattgacacggaaagtaattcttgatgcaactactggggaaatcaaatctgtgggtggatggtctactgctaagtgggaaagatactcagctccagaatttaaaggttacactccagccccggctcaaattgatgaaactgctgtgaacaaggacactcaggatacaactgttgagattagctatacagctaatgagatcacaaagccagaaaccaaggacattactcgaacaattattgtccacgagccaaacggaactgaccaaaaagttatccaaaaagcaacattgacacgggaagtgattctttatgcacctactgggaaaatcaaatctgtgggtgaatggtctactgctaagtgggaaagatactcagctccagaatttgaagattacactccagccccagctcaaattgatgaaactgctgtgaacaaggacactcaggatacaactgttgagattagctatacagctaatgagatcacaaagccagaaaccaaggacattactcgaacaattattgtccacacgccaagcggaactgaccaaaaagttatccaaaaagcaacattgacacgggaagtgattctttatgcacctactgggaaaatcaaatctgtgggtgaatggtctactgctaagtgggaaagatactcagctccagaatttaaaggttacactccagccccagctcaaattgatgaaactactgtgaacgagaacactcaggatacaactgttgagattagctatacagctaatgagaccccagagcaaccagataacagcaaggacaaaggtaataatgacaacaatggtggtaacaattcagatgcgattgtgccaataaatcctagtgccaataactcaaataattcaaataatgcaccaactgacaataagaagactgatgacaccaagaaagataatactggcaagaagattacaaaggagactcctaagaaggtaaagaataataagtctaacaagaccaaatcaacgactacttctaaatctaaccagtcttcaaaggctaagcgaaccactaaatctggtacgattagtcctaaggcagtcgctttagctaatactactgctggtctagctacttcagctaaggcaaatatggaaaacggtattgccaagaacaacagccaaaattctcaaactttgccacagactggtgaaaatgaaagtaaggtagcatttgccgttgccgggttgttagcagctgctttgggcatttttggtatagctattaatcataaaaaagaaaattaattagctaagttgaataaatcatacaaaaagacgcatagaatagcaatgtcattaagttaagacattgacgaaaatcagactttatgaaccgaattattttggctctttgtcaaacaccctaaagtataaaggtagatagaaacatgacgatgtttttatctaccttttttcttatacttagattgagcttgcggttgaacccttcaaggcagccgttagaataaggcagttttgctccattaagcacagcttttaggttatgtttaaaggtcaatagtgttttgtgcattaaagtcccaatttgatcttggcagttgattaataagttgagctcatgagtattgcccgtttcaacggcttgaataaagctttgcatcaggttatatgaattctctaaggtagtgctggtattgatgccttctgtaactacttgtgcttgagttaagcagtctttgtagtgccagttatagtgaggatgaactttttcaagttcatcaaacttcttcaagtataatttccaaggagacttaagcagctgatattgccgcgatcttttatcaaaggtcttcatgacttggaacctcagcgagttgaatgagcgcgtaagcatttgaatcatgtgaaaacgatcaatgacaatctgtgcattaggaaaacaagctctaacgatatcttgatagtaaaaattaagatccatcgtgaccgttttaacgttagctctagcttggagcgagaaacgaccaaaatacttaagcagcgtcttcttgtagcgagttctaagaatctgaacgacttgatgattatcaccatccaggcagataaagtgcagctggcggtaactcatcaaaagctaaatgagctggcaaatattcgtagctgtcaataaaccggtgtgaacagttgcccagtactctttgaacagtattaattgaaatattgttttctctggcaatgctggtcatagatcgatcttcagttaaagctgacaacactttaagcttagaggcattagaaatagaacagtatttaccaattcagactgagccatagatcagcgctcacaagtgcgacatttaactcgttgcttagctaatcttataatgaccggtaagcttgcattagctgtcggatagtgaatgttggtaatcaaatggccattatgtaagagatctagggagccgcagaaaggacaagcaggttgaagcaattcagcttcatagattttatgcttttgcagtttgatcgatttatagaaatcacctttatttataagaatttgtgtggaaacgatttttattgaagaggactatgtcctcttttttgcaataaaaaatcctgttaacagcttatcatatagataagtcatcaacaggaaaaattatagagccaatattttgagattaattgataggggttgaaaagtaaattttatttgttatagaaaatatagaaaaaggattgttcaagaaattattttacgaaacctgcagtgaaccaagtgttggcactaggcttaagtgaccagccagtgaccttcttgttaacagcagtgattgagtattggttggtagttggcacaacgtatgcttcatcatacatccacttttgccacttcttgaaggcattagcacggtaagtaggattgaaggccttctctgagtcgatatcagccaaaagcttagtttgcttaggtgaaacgaaacgagcaaagttgtatggtgcagcttcattgtaaaggtcgttaggggatggttcacttgaaagtgaccaaccaccttcgaagacgtcgattcttggatcgtcagattgaacagcttgtacccagttgttgaattccattggacggccgccgacaaatttaacatccaaaccaactttcttccattgttggatgtagtttctccaaacaggttcagcggtagttgagttgtttctaacagccaagttaattactaacttcttgccgttaggttgaactctgtattcacccttcttcttgtagccggctttatccaataattcgttagccttcttcaagttgtatgggtaacccttgattgacttgtcagtataatcaccaaattgttcagggatcaaagtgttaacgcggaaggccaagccgtggtagtaacgtttagcgactgcatcaacgttcattgcataagccattgccttacgcaatgatggattgtccatcttggagttcttgttttcaacgttcttgccagacttcttatcccatttacctaccttaaagcctaagtagttgtaggataggggaaccttaccaatgaagttggtatcagtagcgttcttaacatcatcccattgggtgttaactacgccagctatgtcgaacttgtgactcttgatggcttgagtaactgagttggtaccgatgactgtcatggataccttttccaagtttggtgtaccacgccagtaatgcgggttacgttcccaagtgacagattgaccacgaacaagcttgcttacgcggaatgggccgtagaagagtggttgttttctaaccttgtcactagacatcaacttggagaatggtacgtcctttaagtaatggtaaggttcagcgtattcccagaagtaaccgttacctgattgaagcataccaggcttcatttgtttcgaccttgcggccatcttcgccatcaggcatctcaataccagaaatcttcttgctcttgccttcgtgatattctgctaaaccaacaatgtcggcaagagaatcggtataacgttgtgacttggagtctttattagcgataatttcataagcgtattccacgtctttagcattaacttgcttgccgtctgaccacttaacacccttcttaacctcgatagttacggtcttggctttacggtcaagcttaaaggtagcagcacctttattgttaatcttgtattgatcgttgactgagaataactcttcttgtcctggctctgcaacttcagtgtcagtggcagtatcagataattctggcaagaaaataccagtgaagggactatcagattcgatagcataatttaaagtgccaccttttttaacacttttcacaggaacagtttgactgaatttgtgatgtgtttcatctgcattattattttttgaatttttattattaccacaggcaaccaaacttaaagctgccccagaaacaagtgctaatgcaccaaaatatcgttttgctttactcattcaaaaagcacctccaaataaattaaaaatatttgagttttattctatgatattaaaatgaaaaaaaatagaaaaatgaataaaaatgtgaaaaatattatttttaaattatttttgaagctaagattagttttctttcttggctaattaggcatagaataaggaaataacagctttttatgttggaggaaaatatggatacagcctggcaaaaatttaaaaataatattccattacgtcgatttgtggtactgctattaattattgcctgcctttatgaaatacgagcaatgatgaacacagtattattaacttttatttttacttatgtgattgtgcatttaattcatctagtgcagcggtattttcctaaaataccaacaggtctaattgttgcggtaacatatctaattatcttggcgctgctttatttcgtggttaccatttatttgcccatgttagttggccaaatatctaaaatggtaaagtcagtgatggcgttttatgaatcaaatgaatcatcgcgcttagccagccatgtaacgcgttatatcagtaaaggtgagattgttacgcaggcaaaacgagttgggacttttgctctgcatacggtgaccaattttggtagtttaacaattgctacctttatgtccttgattttaagtttcttctatacgattgaattagatagaatgattgaattttcaaagttatttgttaaaagtggttactttaaatggctttttgaggatattcgctattttggtaaaaagtttaccaatacttttggtgtcgttttagaggcgcaattctttattgccatttgtaatacggccttgacgatgattggtctggcatttatgcatatgccgcaaattattgccttaggcttaatggtctttattttaagtttagtgccggtagctggtgtgatcatttctttgattccattaagtattatcggctattctgttggtggcattcgttatgtgatttatatcttcattatgatcatgattattcatgcaattgaggcctatgtgttgaatcccaaatttatggctagcaagaccgaattaccgatcttttatacttttttagttttgttagtagctgaacacttctggggtacttggggcctgattgtcggtgtgccgatcttcactttcttgcttgatgtcttagggattaaatcggcgaagaaaagtaaaaagaaagcgagtaaataattgagagtacttttgacaggtgatagcattattgcacgccaggaaggaaaaaatgaaccgcaccttaattggaatttacaacagcttttgcctgagattgaactagaaaatacggctgtttcgggaattaattctggggcattttttgccaaattaaatgaattagtactaagcgtaaagcagtgcgataatttggtgatcttgctgggaaccaatgatttggctatgcacaaacaagtgccagcgaggcaatttaagcaaaatatggaaattatttcctcggcaataatttgtcaatattacccaccacatgttctgcttgtttcgccgccagctgttgatgaagctaagcaacgtgtacggaataatacgttagtagcggaatatgctcagatcgtgaaagaagtagcacatgagtatcattttcgttatgcagatctggcacaagctatgcgggatattggcgatttaagcgagatttgtcaaggagtaaaaaacgatggacttcattttggtgatcgtggctatgagattttaggaaaactaatcgctgaaaatttgaaacaaatgtaaaaaggaccgcaaattgcggtcctttatttttcgctattttaatgttgcccaaagcaagcttccagctagcgcaatggccaagaacggaatgagcaaataggcaaaaaagaaaaacataattcctacgactagtaaaaagccgataattttaatgaggccaattcctaatttaaaaaatagccagagtaagagtaatgttaataataaagaaagcatattaatacctccataaatctatgagagtattttactaccaaattggacgaatagaatagtaggaagattaatgctttagaaaaatttagttaccggtaacaagataaatcatattgaaagctctttctgtaaccgctatattttaactattgaaagcgatttaagaaacgagaggaaaaataaatggaggagaaaaaaactgggttacctacgctagctagtacgacaatttggatgattagtttggggtatttgggtgtgcaaatcgcctttactttggaaacatcacagatgagtcgaatcttccaaacattgggtgctgatccgacaaaattaggctggttctttattttaccgccgttagctggattggtagtgcaacctggaattggatcattatccgatcgaacttggattcctaagattggacggcgtttgccatatttattagtcggtatgatctttgccgtaattactatgattttgttaccaaatgttggtagttttggtctaggctatggttcaattgaggctctaatatttggtgctgttgcaatcgcgatattagacgtggcatcgaacatggcgatgcagccatttaagatgatgatcggtgatatggttaatgatgaacaaaagtcatacgcttacgggattcaaagcatgttgtccaactttggtgcggtaattgcggcctttttcccattcttattaactagtttgggtgtagccaatactgctaaaaaaggtgtggtaccacaatcagtagttatttcattctacgttggtgctgctgttttagtaattacttcactctttactatttttagagtacatgaatatgatccagaaacatatgcgcgctaccacgggattaaagaatctgataacaaagaaggtggcggctggattgaattgttaaagaaggcgccaaaggtcttctggcaagtatccttagtgcagttcttctgctggatttcattccagtatttatcaacttacgccactggtgcgattgcgcaaaatgtttggcacaccaccaacgcttcttctgctggctaccagattgccggtaactggtttggtgttttgactgcagtgcaatcaattgcggcggtaatttggtcctatgttttggctaaggtgccaaacaatcaccataaattgggttatggccttagtttattcttaggcggggtaggttatacttcaatcttcttgattcattcacaaagtcttttgattttagcatttatcttgattggtatcagctgggccggaatgaatacctacccattaaccatggtatctaacgccttatcaggtaagcacatgggaacttacttaggtttattcaattgttcaatttgtttacctcaaattgtggcatcactgctcagtttcttaattttcccaatggtcggcaattccatgccagccatgatgttaatcactggtatttcaggcttcttgggagctttatcagtcttagcaattaaggaaacctacgtaaaatagaatatcttctcattaaaaaacacactacaatgtgcaattatgcatgtagtgtgttttgtgatttatctatgtagaaaaattcgccttcgtctttgaacattttgtaggtttctttgatcattctttcagggattgcataagattggacgaatgcaattgggtcatagaaattatcttcttgtccgcaagagtattgatagatcagatgcaatccataaatatcggcatctctttcttcgtcatcaaggccgccataatcaagacaacaattatattgttttaagttgggcctgcaatccatgatatgcccaatttcatgagcaactgtaaatggtacttccggtgaatggtggtgccaattcatgttgatacagatttctcgctcatttttaaatgaaagagagggattattgggatctgattcaaaaaagacgtaaccaatatcatgctcataagcataattaaataaatacgtgattagttgattttttctatagttattgtccactgccatgttttctagcttctctctctttgatgtctctcttcatgagttctcggaccatgtcaagatattctttaggaacaggatgaccatagtatgaatagggcacctcgtcttccaaattcacagtgtcctgcaaacgtggagcagggtcatcggtaatgccacttaaatagtctattgatgtatgcaaaaccttagcaactgcacctaaggccataataccaggttttctggttttccaattgtagatacttcttttgcctagtccagctttgtcatttacttctagtaaagacatttttctttttttcgctaattcttttgtacgctcaaactcaatcatgacgaggttttcttcactttctaaataaaaaagtatgctaaaaagcatattttaacttgacatagtattcgtataagcatattatatgaactgtcaacaagttaaaaacaatctaatgaccagaaaaattctatgtggtagtggaatcaacggcactagtctgttttttatacccttattgtagtatattgacgtattttggtcaatgactaatatgtcaatacttaaattaggcctgcttgttgaacattatcaaacagaggtgaagtccaatggacattcgttaaccccctctgatcatttgatcaaaagagaggtgatttatttaatcatggatattcatgattacgtcgagctgattactttggctttatgggtaattagcgtagtaggtattggcatcttgagcagggttcattttaagaacaagcgcttagagcaattccgcaatactgcagacaacttgatgaaaagctatgtacgcttatacgacaaggaaaatctttctgacgaacagaagattaatcgcgttggcaatgcagtagtgaacagtcttgaggcaaaaggcttcaagctgaacaagcaagaagtgcaggatatctttgcggaagtagctaagcaaatggatgagcagactcaggataagtagtaataatttttaatttttcggaggttttgttatgtacgaaacatcaaatatttcaaataatggtgagttttcattaagtattggtcatcattcagttgtccaaaaaggagatgtaggtcaaaactatatttacgctttgcagttacgtgataatcaaaagagtacttacgtcttacgtagaagtaaaaatggtggtaattttaacactattttagatttacacggttcagcagctggtcatacgcagacttggtcctatgcaggtcctaataattggtttattggaactaagccgagtggaagctgggctattcaaattgctcgtgtaaatattaagactaatggtggtcgtcatactacacactatgattttccacgtttagctcacttagatcgtgccggtaatgtaccatatactggtagtttagtacgagcagaggcagcggtttctccagatcacactaagttcttattggttacagttgataacaatggtaagggatattttactatttataatctggctgctattaatgatgcacttgatagcgtgcaatataatagtggtgcacagcgttattatgatattggtaaaatttcagaatctgatgttgtaaataagtttactattgatagattgtattcaggtgacgttaatgataagagctatattttacattcgcttcaaggctttgatgtagataacaatttaaatgtatttatttcaagtcaaaaagctccaattattgattcagcaacaggtagattcccagcaggaaatacatttcataaagaaattttggttattcccgctaatgctagagatgatcaaaatcaatggactaatgtaaatctaagcgcttctggggtaattgataaaccaggaactggtcgacacactgaagttgaaggtattcaagcaatcgatgctaataatgcatatttaactgttgcatatcatattaaaaaatatgattctttagctggtgaatataagtcatacactgattacagtacaatttataaattgtcatggtattaattaagcgcataaagttggataaaaaatcctaaaaagaagatcgaatgttactgcaagatgtaatattcgattttttgtgttttcaaattaatttatgtaaacttataaaactctaattaacgtaagggggtataattgcagtgtgagaattaaaaaggatgattatgatgaagaaaaataaaattgcattaatttctgcagctgcattgatagccgttacacctttaacggtttggactactcaacctaatgaagtacaggccgcaggcacttcaattagaaagactattatgcatactgcaattggttatgatacaaatggtaggaactcgggcataaaactttatccatataaagttattaacgttgaccagattcctgtccgtattaatgaccaacaatattacaaagtaactggtaaatacttatatataaagcctacaaatatcgatggcgtaacacgaaaaattactcataacacttatatttatagtagctctactaaacgcactttttttaacggaagacgaaaattaaataaaggtgaaactattactacatatggtagttcttacaaatttaaagatggaaaaagttactttagaataggcggcccaagcaagcaatatgttaaagcagctaacttaagttcagtaattaaaagcaatactgcttcaggatcaactgatgtaaataggcactatgccaaagaaactatagtaacagttcatgttagaagcacatataagaagacagcaccaatatttacttttgatgaaaatactactgctgagaataaggctgtgattgtaaaaagagttccaaatggtactaagtttacagttgatcggctagaatatggcaaaagagctgacatggtagcagccaaaatagcatcattcaatggaaatcaggctatttatcatattaaaggtactaataattggatttattcaattgatgttgatcctgagaaacagttgttagagcaatattacaacaaataaattttaatttcagttaaaatgtcaaattaagcaaaaagagaatcctgttccgttgagcagggttctctttttggatattcattagtaaattgtttattttttgatctagaagaattagtcttttacaacatccttaatgttcaaccattggctcttgttgatcttaacgatcttcttgccatcagcctttttgacatctttggcagtgtaggttgaacccatagaaactttttgagtagttttgtgaccttgagcattcaaaacgttaactttttgatttttggtgtctttaacagtaacaaaaatcttgtcacccttcttgattgaaggatcggttggcataacttgtgcagttccaagcttaggagcttcaaaactagcagcttgactaactgaagcaccaacgctcattaaacccattgaagcaacgacaactgaaacaaccttaatcattttctttgataacataatgaatacctcttatcacttatctactggaacttttcgttcctcattccgtacaattcttattatataacgcaaggggaaaagtacattttttaggaaaatatttttactgggtaaatgttactagaataacgttttacggaatttcgtaaaaagggcagaaaaaaacagctattcattttgaataactgcggagatttttggtataagtcccttaacgatgacctcggctcttattataataagaaaatccgcaaattcacagtgttcatattatagctgtcgttcactcttaacttataatcctaaaataacgttctaatctgtgaagtattgcagaatatcctcctcagttaggcgttttttgtcgtcgcctttgacatcaaaaacgattctaccattgtttaaaatgatagtgcggtttccgtatttgattgcgtcttttaattggtgagtgatcatgacacaggttaaatgctcttcttgcacaactttatcagttagttcaagcaattcgcggctagtatttggatctaacgccgcagtatgctcatctagtaagagtaaatcagggcgcttaattgtcgccattaaaaaacttaatgtttgtcgctgaccaccagaaagattacccacaaaagtatttaagcgttcatttaacccattagggagttgggccgcctggcgtttaaattcttgcatatgtttatctaggcctcttaaacgcagaccgcggtgttcacctcgtttggttgcaagtaataggttttctgcaacagtcattcgcggagctgtacccattttaggatcttggaatacttgggcaatatatttagcgcgttttacttcagaaagattggttaaatcttggtctttgagcagaatttttccgctagtaggaaaaatagagccattgataatatttagtagcgttgatttaccagcaccgttggttcctaaaagagtaacaaaatctccatcttcaagttttagattaatatttttgaggatttgcttttcttcattggtaccagcattaacggtagtggtaatattttgtaaatcaagaatagtactcatggtttttcaacgcctttctttaataatttacgagtgcgaaatttttgttcaaataaaggtagcatcatacaaatagcaagaataatagcggaaatcaacttaaagtcgttggtactaaagccaagttggaggactaggagtaagataaggcgataaataatactgccgataacaactgctaccaagcgggcggttaaacttaaattgccataaacgacttcaccaataatgatggcagctagtccgataaccatagtaccgatacccatattgacgtcggcgtagccaccattttgggctaaaaggccgccagctaagccaatcaagccattagagagcattagacctaagattttcatattatcggtattaatgccaagtgattgagccattttttcgttgtcaccagtggcaataaaggcttgaccaagatcagtatcaaggaaaactgctagcaaaacgatgacgataatggcaatgatcaaaccaacaacaatagtaggaaaattgatcggtaatttttgtaaaagctgaccgtttagtaaagtatttttgttaagtaaaccaacattagccttgcctagaattctaagattaactgagtagacgccagtcatcgttaaaataccagctaaaagaacaggaatttttcctttagtatatagtaagccggttactaagccagtgaccatgccagcgaagaaggaaagaatggtagctgctaaaggattgacgccatgaactaaagcactaacacaaattgcggcaccgaaggggaaggttccttcaacagtcatgtctgggaaatttaaaattctaaaagttaggtagaggcctaaggctaaaataccccagagtaagccttggccaatagaagaagtaattaagctcatttgataattcgtcctttcttttgggcagcttgaattacactgttaggaatagtgatgtttaattcatgtgctgctttttcattgattactgtttcataatgggttacgcgtctgactggaagagcagcagggtttttaccatgtaaaatttgtcctgccatttgtccagttaagattcccatgtcgaattgactgacacacctggtagcgagaccaccacttttaaccatagtatcggcagcaggaaaaactgggatcttggcactgttagtagcctttaataaggtggcaattccactagctacagtattgtcggttgggacataaactgcttgaaccttgcctaccatggtttgggcaacttgttcgatatcattggttgaagtgatagtgtaagggataactttaagtcctgttgcttcagctagtcgtctgaattcacggtactctgatgctgatgaatcatcacttgaggtgtaaatgacaccgatgtttttggctttaggtagaatttcttgcattaaggccagctggctggcgattggctggcggtcctggacaccggtaattttaccgccgggatgcgctaggctttttactaaatgggccccaagaggatcgctgaccgcgcccataactacagggatgttgccagaagtattagctagagattggacagcaggagtggcaattccaatagttacagtcgcattttcctggctaaaacgatcgctcattgatttcagattactttgatcaccttgggcattttgaaaatcaattttaagattttttcctttgacatagccttcatctttgagaccctgaataattcctcgatgaatctgatctagagcggggtggctcattgtttgcaagataccgacagttggcgttttcttttccgcatttttcttatttacttcactgacaaatgcaactgccagaaaagcaaaaagagcaataattgttccgattaaccttttcattctttttctccttcaaacaaaaaaggcacttccttttttcgggaaatgcctaaaacaaaacccgcacgttattttccgtgcgagcaatatttcttgaagattttaccagcacagatacgatcttaatgagtcgcatctgtacttcacgaacagaaacaactctagtgctggaattgccaacgattgattgctgtaaatttaatcatgataaaatcttcctttcgttcaaatttgttagctaaattttaagtaattatgagaaagatgtcaaatgattttttgttagatttatttagttttgaataatttttaaaatgctataataattattccggcaaccatcataaaaagaagggaggaattctcttgcgctatcaacaaataatttttgatgtagatgacacaattatcgattttgcggcaactgaagattttgctttacatagcttgtttaacgctcatcactggcctttatctgcggaattgcagcggcagtatcattcttataatcaaggactttggcgccaacttgaacaaggtgaactaacttatgaagagttaagtgaaatgacttttcatgattttattttggatcattttggcattgagattgatggcaagaaggcaatggatgaatatcgttcatactttggtgaagcacaccaattattgcctggggttgaagatacgttgaaatttgctaaaaagcagggctataagctgaccgttttgagcaatggtgaaaaatttatgcaaaatcaccggttggagcttgctggggtgaaaaaatattttgacttaattgttacgtcagaggaagcccattattctaagcctaatcttcatgcctttgactatttcttcagtcgaactgagatcggtcctagtgagacagtcttttttggggacggcctacaatctgatattttaggtgcagaaaaatatggctttgatagtatttggtacaatcatcgccatcgtaaaaataccttgcatttgcatcctaagtttgtagtagaaacttatccagaattggttaaattaatgcagaatgattttgagaagaagtactaatcattatactttttgctcttcaagaagatgccccaaccaatagttaataagctgacaaaaattattaaaatccaaaagccgttttcattttctttacctggtaagccgccgacattcatgccccaaatgccactgattaaagcgggaagagcaattaccagggcagctgaatctagatatttcattaaatgatttaggtgactgtccatcatggcggtaaagaggccgctaatggaattgagcaagtcagtgtaaacgtgaatcattttggtaattcgtttttgcttggtcatgatacttttgacgcgggcttgatttgctagcttgttttctactaaataattaccaaattcttctagactaggtgtttgatcatctaaggtatgctttaagtaaactagctggcgagttaaatctgttacttttttaattctttggtcttagttgttcttcttgcagcttgatctaaatggtcaattttttgtttaattgttactaattctgcatgaagatgcttgatttggatacacaggctttgaaaaattgtttcaataatattttcttgcggttttaattctgaaagacttcttgttgtgccaataaagagatgattttggtcaaaaattgtaaaaattggaattagctcttgttcaattggcaagtcattacttaatagatcgaaactcactaataagtgaccattttttagtttattagaatcaatagggataaaacgagcaacctcaatcgaggaattagggtaagtgaaaattgtaggatctagatcccattttttgattaaatgatcgatatcgttttgcgtcaattgatcttttaaaattatattctgactattagtaagcatatttgttcacctctgtttcttttttagtttaagattaacatgtaatgttttttagactgaattaagttgacttgaaaatatgtttttttaaaaaatatagaaaggtgagaatatggaattacattcacttactgatacttatactttgaacaacggcgtaaaaattcctgtaattggtttcggtacttggcaaacaccaagtggagaagttgcaagagaatctgttgaagccgcacttgaggcgggataccgtcacatagatactgctgcagcttacggcaatgaagaaagtgttggcgaagcaattaaacgtagtggcgttaaccgccatgaattatttgtaactactaaattgtggaattccgatcatggttatgacaagactaaaaaggcaattgatactagtctagaaaaattagatttagactatcttgatctttacttaatccattggcctaatcctgtagctatgcgtgacaactgggcagagcttaacgctgaaagttggcaggcgatggaagaagcagtgaaggctggcaagattcgcgcaattggtgtatccaactttagaaagcatcacctggatgaattaatgaagactgctgaaattaagccggtagttaaccaaagttacttgaatccgagtgatttgcaaccggaagtaacggccgcaagcaagggatatgatttgcttaatgaggcttacagtcctttgggtacaggtggtttattaggcaatgaggtagttaatgcagttgctgaaaactatggtaaatcaccagctcaaatcttgattcgctggtccttacaacatggctttttgccattgccgaagtcagttcatcctaagtatattgcggctaatggtgatgtctttgactttgagattagtccagaagacatgaagaagttagatggtttacgtggtgcaagtaagttggctaatgatccggatgaggttaacttttaatttaatttggaataaagaaaattgaattatcacaagaagtatcttatttttgaagtaagatacttttttattaggtgagacaatgaagaaaattacaacaggaattgtagctcacgttgacgcgggcaaaacgactctttctgaggctctgctgtacaaggcaggaaatttgcggacgctaggaagagtagacaatggggatgcttttttagatacagatcaattggagaaaaaacgtggcattaccattttttctcatgaagctaaattaacgactgatgatttagaaattacgttgttggacacaccgggacacgttgatttcagtgcacaaacagaagaaacgctgagtgtacttgattatgctatcttggttatttcaattacagatggtgtaactagttatactcgcactttgtggcatttgctcaagcgatatcaggtaccagtttttatttttgtgaataaggttgatgcgataggcgctgatcgagggatggcgttggttgatattcaaaagaacttaagtgagagttgcgttgatttttcgaagattgatgatgaattttatgaaaatgtggctgccacagatgatgccttgcttgagaagtatttggatagtggtgccatttatgatcaggacgtgcagaatgcaattgtgcagcggaaagtttttccaatttattttggttctgcgttgaaattaacgggaattacggaatttttagctggttttagtaaatggactaaggaaaaggaattctctgataagtttgcggcacggtgctttaagatttcgcatgatactaaaggtgaacgcttaacttggttgcgaattttgggtggtagcttaaaggcaaagactgagctagctggtgagaaaattaatcagctgcgtagttataatggtgaaaaatttgtaactattactgaagcagctgctggagagatcgttgctgcaacaggattgactaagacgtatccaggacaaggattcggcgtgggggatgcaccaactgcactgcttaagccagttttgacctataaagttaatccccaggataatgatcttcacgcttgcttaaaagctctgcaaaccttggaagatgaagatccaccgctgcatgtgacttggtccgaacatttgcaagaaatccacgtgcaagtgatgggaaagattcaattagaaattttagaacagttaatgaaagaacgttttggtttgaatattgtttttgaacagggaagtattctttatcaagaaacaatcactaaaccaattgaagcagtaggccactttgaaccgctacgtcactacgcggaagttcatcttttactggagccactgccacgtaatagcggtattgtttttgaaaataaatgcagtttagaagttttgactaaaaattggcaacatcaaatcatgacggcattgaagtctaaagaacatcttggtgttttgacagcttcgccgattacagatatgaagattaccttgatcggtggtaaaggctcaattgtacattcggttggtggcgatttccgtgaagcaacttatcgtgcagtgcggcaaggtttaatggaaaaaaagatacgccaacaaactattttgctcgaaccgtggtatgatttccgcttagaaataggaaaagatcaggtagggcgtgctttaaatgatattcagcgcatgaatggaaaatttagtacgcctgaaaatattggtgaacgaacagtcatatccggttctgcaccggtagctgaaatgcaagattatgcgacagaagtgcgcaattatacgcatggtgaaggtaatcttgaatgcgtagtcagtggttatttgccttgtcacaatgcggcagaaattattgaggaaaagaattatgatcccgtttctgatctggagaatacgcctaactctgtcttttgttcacatggtgcaggtcacaccgtcacttgggataaggtgccagagactgcacaatatccttatacttatccattagattagcatgataccatgaattgtttatcttgttacatgtgaaacattaaaaatgcggcatagtgcttttcttattaaaaagtgcaacttgaaataagcgaaatatttgactagttatgaaagaaatttcattttattagcaaaatactgctagaaaatcgcttgcatagtaagataaaggtacgatagaaaggtgataaaacatgacacaaataccttttaaagctgtagcggttgatctagatggcacttttttgaccgaaaaaaagacttttgatcatgcgctatttgcaaaagttttacgaaaattgcaagctaatcaaataccgtttatctgtgcaacagggaaccaactaattcgttcgcatgaatattttgacgagtttactaatgaagtagattatgtgtctgaaaatggggcaattctagaagccgatggcaaagtatttaagcggattgcgattgactatgatactgcacaaaaattgttacattttattcaaacagaataccctgaagcaatcattatggttagcgcacagcatcattgctatattttgacgagtatggatcaagcggataaagacgacattagaatttattatcgtgatgttcaggaaatcgatcagtttactgacattgatccagccgatgcgatcttgaaggtttgtctgacagctgatgatgaactggcgcaggtgattcaggatcggtttaatgaaaaatatggtgactgtattcgcggcactagcagtggtaatatgacaatcgacttggtgcataaaggcattaataaggccaagggcgtagacgatatgcttaagcattatggcattgcgcaaaaagatttgattgcctttggcgatggcgaaaatgatattgatatgcttaaggcatgtggctatagttatgcgatgaaaaacgccaatgcgaaggctaaggcggtagcaaagtatgaagcgccaacgaatgatgaaaatggtgttttgaaagttttggctaagtatttagatattgattaatttaatacgcaaaaaagacttgagaagtaattttcccaagtcttttagtttgctttattaactgctctgaaaatattaagtccgctaattagaatgatgaatccacaagctaaaatcagaaccgtttcaccagagctgtctaacaaaattccggcaacaattgaactaatcggtccaccaatagaggtactggtacgaatagtagttagcactctgcctaatatttcatcgtccgcagtaatctgaatcaatgattctgccaaaatattgtgaatactcgtcattagcccaaataagaaaattagtcctgtgaatatcaaccaattgttactgaagaaaattatcaaaagtaatggtactgcactagctatccaagtaaaaccaattgtttttacccgtacggataatcttcctgcaatagttgcacctattacaaagccaatcataaaactgatatagaacatactgtatagtcccgcttgaccattttgttgagcaattcttggcaacagaatggccattgctggcgtcacaaaagaatacaggattgaggaccagaagtaatgacttaagaaataatttgttttaataaacttatagccattaagaatttgattgaggtattttgcctctgcttttttgactttaggtctatctttaatttcttttagggcgtaaaacagaaaaacaaaactgattaggctcagtagactgcagatcaacattacattagctgaaattaaaaaagttaataaaaatccagaaagagcagttcccgctacattcacaaactggtcgatgttgctaactttagaaattagattatttaattcttggtcatcagccgttgtttcttttaaaatagcccggtcagctggattaaaaaattcatcgcagacagatactattcctgcgcagattaatgccaaaatataacttttgctaagttggtaaactgcaattgttgtggcaaataggaaaacagtttgaacaagaattgaatagtaacttgtccttttgaatgaataatgatcgataatggggccgtagaatattgataaggcggcagtggtggaaaagatggcttccgcaattccgacgacaaaggaacttttggtggaagtttgcagccaccagataaagaccatgctgaagagggaattagctagtccgccaacggcacgcgagaaaaaatatgatttcttttttaacatttgaagggttcaccttactatcatttggtcaaaggtatcgtatccacaccatgaatatggatggtttctaataattttatctatttttttaaatacatatttagactcattaacaatgcttgctctgttttgaatttttgacggataaattggatcttcgaaagtgatcttgattttgtatttttctgtcatttcagtatgtaagataataattggaacttgcattttattgcttacccaagagctacctaatggcattgaaacacgtgctcctaataaatttacagtatgttgtggccctagtcccattgaaatttctggtggaattgctactactttgccttgtctgatgtcttttaacgcttttcttaatattaatgggtatggaacaccataactatcaacaagagactgtaaaatagtttgtgtaaggatgaatgattccttaaatttatttctttaaacattagaaaaaggagttcctttctcgtatgattggtttgaacaaaaaaacacatacagaaagaagaactccttcatgaatgattttaccaaagattttgctcaagctctattcaatccagacaaaataaatgatttattgcgcaaagagctacaacaggctgttaataacttgttagaagctgaattgactgcctttctgggctatgatccctatgccagaaatggctggaatactggcaactctagaaatggtgcttatttccgcaaagttgatacgcaatttggcccaattgaagtgcaagtgcctcgggatcgcaacggtcaatttcatcagcacacgctgcctggctacaagcagcactcggatatcttggaaagcatgattatcaagctttactccaagggcgtgaccaccagggaaatagccgatctaattgaaaagatgtatggcagccattacagtccagctcaggtatcaaatatttccaagcagatgattccaaaggttgaggcttaccacaaacgcaagctaagcgacaagtttttctgcgtctatttggatgcgacataccttcctttgcgccgagaaacatttgagcgtgaagcagtctatattgccattggcatcaagcctaatgggcacaaggaggtcattgactactgcattgcacctagcgagaacattgaagtctggacagatatgcttcaaaacatgaaatcccgaggcttaaagcaagttgagctttttctttctgatggtgttgttggcatgaaaacagccttggccaggacttatcctaaagctcattttcaacgctgtttggttcatgtcatgcgcaatatctgcgctaaagtacgcgtcgacgatcgtgaaaagatcatgaacgaattcaaacaggtgcatcaacagacaaacaaagaagaagccacagctgtcctgcatgacttctataccaaatggggcaaggtttacagccatgttatcagaagcttgaaagacatagaaccagatctgctggtcttttataactatcccaagcagatcagagcttcaatttattcgactaacatgattgaatcatttaacaatgtgatcaagcgcaaagctaagcctaaggcagagtttccaactgaacagtcgcttgatgcttttattggcattcaggcaatgagctacaatgaccgttatttcaatcgaattcataaaggctttggtcaggttcaggacaccttagaatcctactttgattaaataaataattaaaaaatcaatttacgagaaagaactatttacacaaaagatttgacagtttcgtagaaaatgaagccaaacttcttattatgcttgactttacgtagaaaaagacctaaaagtgtctaacttttaggtctcagttcagtgtcaaaaatgacacctttttttattttgaattaaagtttatcagcaattatatccattccattttctctgagaaaatttgatattgttttggctttctcaagtttattattgagaatagattcatagtaattagccattattttagcaaaacaatttttaggatcaattgttaaagaattcagtattttaactgaagcatctatattagtatttataatacgttgctttttttttatgaaataacttaaataattaactaagattgcggatattattttttgcttttcttcaggaagtgaatttatattatgggtgttctttataatattttttacaacagaatttatttcatttggatcaaaaatggacattgaaatagcaaatagtcttaagctattttccgtccaattatctgtttcgaatatagttttctttatgtattgtttttcatcattagaaatctgggctaaagtatttgaaattgctgcttttataataataatttgtgccctaatattatccaaatttagttcactattgtttctatcgtttagcattttttctaattctgttattttcgacaaatctttttgatagtaagctgtgtgtaataaattatcacaatcaattttagatatgtgatttttattagtattattttcaacctttttaaaaaaagaagagtaatcaatattatgcaaacttaaaatttgtaataaatcatttgctctaatactacaaatatcgcgttccactttagagtaaaatgatttagtgagtatgttgccagccattttactttgacttagatttaattgttttctttctaacttcaatgcctcgccaattttcattttctttcctccaatgtcggataatgactaaatcatcatttgctttctgatataaataaatttatgcaattgaaattttatgtcctgaaaagtatagggtaaattattcaagaataagatactaaatatttagtatcttattttgcatacaattaggctgaaaaaacacaaaatactaatgttataattgattttagaacttaacaagaaattagggaacttttatgaaccaattatatcaagaaattaatgatgctttatatcatgtatattacgggattcagcggattgaagaagaagaactaaagaaaagtcgtttcaatgatcttactcctaaggaattgcatgcagtagatgctattactatgtatgaacatcctactacttcgcaagtagcagaaaaattgcatttgtcacgagctacaatgactgtgactgtcgatcggctagttagaaaaggctatgttgaacgaatccgaggtaagcaagatcgtcgtattgttcatttaaaattgacaatgcgaggcagagtagtgtgccgagcatatcatgcttatcataatcgaatggttaaaagttttttgcaaaatctagatgagaatgaattgcaaacaatttatcatgcatttaaaaatctggatgagtttttgaactcacactaatattattttgaaattgcttaagcagactggagatattcagtctgtttttttgtggacgaaaaaaatttaattacatagaagtgttcttagtattagtgtaaatagaatttttgagttctatatgaacttgtaatgtgttgacaataaaaaaagagatgataagatttgaatatcgaatagttagatatactaattttaaaaaacgaacatggagatgaagttatgccaatgaatactgctgagattcaaagcaagttagattgtcaagctcccttgatgctgttagatcgagttacaactttgaataaagatcaacaagtaattgctcaaaagagtgtgagtgctaatgaatcttattttcaagggcactttcctgagaatccaataatgccaggtgtgctgctaattgaagccatggtggaggcaacacaatttatgtgggatcggtcagatttgattcttactagagttaaaagaggccgctttcgtgagatggtcaagccagggatgcagttgacaattaaggttaacgccattaaaaaatacgcatgtcaggcaaaggttttaattgatgataaagatgtttgtgtagcagacttggaatttaaggtaacagaagaaaattgaaagatgtaaaaattatagcaactggttttgctgtgcctgagcatgtcgttactaatgatgatctcagtaagatcttggatacttcagatgaatggattgttaaacgaacaggcattaaaaggcggcatattagtcaaaatgaaaatacttcggacttggcaactcgtgtagcaaaaacattattgagtcagagtaatgtaagaactcaagatattgatctgatagttgttgcgactatgacacctgataatatgacaccagctacggcagcgattgtccaaggcagaatcgctgccgaaaaggcggtatgttttgacatttcagcggcttgttcaggcttttcttatgctattagccttgctagaagcatgatgcttaccaataattggcgtcacgcaattgtaattggcgcggaggttttatctaaattgctagattggactgatcgctcaacggcagttttgtttggtgatggagctggtggcgttttattaagtcaaagtaatgccactcatttattgggacaaagtttaaaaacttatggtaataaaggtgatcaattaattgcaggtcatttagatgtttcttatgacattttgaaaaataaaaaaagctatcagcctttaccatgaatggacaagagatatatcgttttgctacgcatgaagtaccacggtcaattttgaaagcttgttcaaatgcacaaattgaacttgatcaaataaattattttcttttgcatcaagctaatagtcgaatcattactcaagttgctaaaaagttaaatcagcctttaagcaaatttggtgtaaatattgacgagtatggaaatacagcggctgctagtgaagcaattctgctggctgaaataattcagaaaaacagaattaagccaggcgaaatcattgctttaagtggctttggtggtggcttaacaacggctacattgattattaagtattaatacgaggagaataaaaaatgactaaaaaagaaattttaaaagatgtacaagaaattgcccaagatgaattagatgttgaaccggaaaaaatcacaatgactaccaacatcaaagaggatttagacgccgatagtctagacctttttgaaattttgaatgagttagaagataaatacgatcttgatttagatgctgatgagagcatccaaacaattggccaattagttgattttgtacaagcagaaatggataagcaaaaataatgagttacggtattctgtttagcggccaaggcgcgcaaaaagcgggaatgggacttgattttttagacgatgatctatttaaagaaacgattgaaaaagcaagtttagctagtcaggaagatttggttgccattcttagagatgaaaatggagaactagataaaacaattaatgttcaacctgctctagtagcctttgaaataggaatttttcgtatgcttaaaagagactgtccccatctaaatattagtagaatggttggtctgtctttaggcgaatatagcgcaatgtatgccagtggtagtctagatttagaaaataccctgagcttagtcagtgatcgggctcgttatatgcaagaagatgctgatcagattgaaaacggaatggcggctattttaaaacctaaactcaatgatattgaagttttaattcaaggcctgcaaaagcaaaacaaacgagtttatattgctaactacaattcgcctaaacaagtagttattgcaggtgaaaaatgtagcgttgcattagcttctaagcaaattaaagatcaagatttggctaagcgaattattatgctaaaagttaacggcgcctttcatacaccactatttaataatgcaaaaactaaaatgacgaagcgattagcaaatataaagtttcaagaaagtaaaactccggttatatctaatacaactgctctgccttttagtggaaattggcgtgagattatggctaagcaattaacagtccctacgcattttggctcatgtattcaatatttagttgaacatgagcaaattgatcaaactttagagattggtccaggcaaggtgttatcttcatttgctagacaagtagatcgtcacttaaagtgtagccatattggcaattatgcagaatatcagacttttgtagaggaagaacatggaattaaaggataaagttgtttttattacaggctcaactcaagggatcggcgcagcaatggcagttgcatttgccaggcaaggcgccaagcttattgtgaatgggcgaaaacaagagttgcctaaagatttaaaggatgcattggataaagagaatgctgattatcggtatttatcagcagatttagcacaggacaatttagaggagataggcaaaacagcctggaatttatttggtaagatagatgtcttgataaataatgcaggtcaagcaaaagataaaatgttcattggtatgcatgatgctgatttcgaagaggtattaaatttagatttgaaagtaccttttttcttgagtaaagcaattatgaaaaggatgaataaagagcgttccggggtcatcatcaatttatctagtgtagttggcttacatggcaatgtgggtcaagcaaattatgcagctgctaaggctggtctaattggttttacaaaatcaattgcacgtgagggagcgttaagaaatattcgagttaatgcgattgcaccaggaatgatagatactgaaatgacacaaaaattgtctgaacgtgttaagaaaaatattttggaacagatacctttaaaacgtttaggttcaactaatgaagttgctcaaggagcggttttcttagtgcaaaatgattatgtgacaggacagacaattgtaattgatggtggaatgaccatttaaagaggcaatatgcaaagagtagtaattacaggaatgggggccattgcccctaatggtaatggtgttgaaaattttgttcagaatactttagcaggcaaagttggcataaaaccaattacgaagtttgatgcatctgaaacaggaattagtgtagccggcgaaattgatgattatgacgaaaatgattatgttggcaaaagagaagcaagaagactagatttgtattctcaatatgctattcaagttgctaatgaagcgatggaaatggcagggattgatgaaaaaaatactgccccggaagatttaggcgtgatttttggatccggaattggtggattgactactattcaagagcaagtaattcgcatgcatgataagggacctaaaagagtatcaccactatttattccgatggtaattgctaatatggcagctggaaatatctctatccgttttaatgctaagaatatttcaacttcaattgtgactgcttgtgcttcaggaactaattcaattggtgaagcttatcgtcgaattaaagaaggtgatgcacaggtaataattactggtggatcagaggctactattaatgaaacagcaattgctggtttcgcagccttaacagctttatctactagtacggatcctgatcgagcatcactaccatttgatcaaaaccggaatggttttgtgatgggggaaggagctggagcactagttattgaaagtttagaacatgctcaaaatcacggtgccaaaattttaggcgaaattgttggctatggcacgactagtgatgcctatcatattacttctcctgatcctaaaggagttgaagcagctcgttcaatgaatcaagcaattgtacaggcaaatattgatcctagtcaagttggatatgttaatgcacatggtacagctacacatgctaatgatgctggagaaagcaaagcgattaaccaagtttttggaaaagatagttcagttttagttagttcaactaaaggaatgacaggtcatttattaggagctgcaggtgccattgaagctgtaattactgttgccagcttagaaaaaggaatcttaccaccaaatgttggttgttttaagcaagatccagaatgtgaagttaatctagttaataaagataatcaacagcaagatattgagtacgcaatttctaattcttttgggttcggtggacataatgccgttttagcttttaagaaatggagcgagaattaatggacttagaaaaaatacaagctttaatgaatcaatttgaagattcagatttacgtgaattgaaaattgatgatggtgatttccatttctatttaagtaaaaacaagaataaagttactcagacagtacagccgactgttcaaaagaccgctaaaaaagtggaagaaacagctcaacctgttgttcaagagaatattgacaccaaggttaaaccggttaaagcacctatcgttggagttgtttatttgcaggctaaacctggacaaccagcctttattaatgtgggcgatcatgttaagaaaggcgacacaatttgcgtgattgaggcgatgaaaatgatgacggaagttaaaagcactttaaccgggactgttagtgagataaaagttgaaaatgaagacctggtcgaagtagggcaacctttaattactgttaaggaagattaatttatgagtaaagaactagggattgacgaaattaaacaaattattcctcatcgttttcctatgctgttaatagatcgcgtcttgtttctaaaagttggtcaggaagctaaagcagttcataatgttagttttggtgaaagctttgttcaagcaagttcctctaaagatccagtttttccttctattttaattgttgaagccatggctcaaacaggtgcagttgcattattgagcaaggcagattttgccggcaaaaccgcgtattttggtggaattaaggaagcaaatttcattgttcaagcaaggccaggggatcagatagttttgacaacaaagttaactaaaatcagaaaaaatattggcattggcataggtgaagcgtgggtaggcaataagaaaattgcacaagcagaactaacgtttatgattggttaggtaaaatgaatgtttaaaaaagttttaatagcaaatcgtggtgaaattgctgtccgtattattcgttctttgaaggaaatggggattaaaacggttgccatttattcaactgcagatcgagaaagcttacatgttcaattagctgatgaagctgtttgcgttggtggcccgcaacctactgagtcatatttaaatattaaaaatattttagcagcagccgtaggcatcggggcacaagctattcatccgggatatggttttttatctgaaaatgcagaatttgctcaaatgtgtgaagattgtggcttaacttttatcggccccaaggcggaaacgattgatcaaatgggcaataaggaacatgcgcgtcaattgatgatggcacacaatgttcctgtaactccaggatctaatggagttattaaaaatgctgaagaagctaaaaaaattgctgctcaaattggttatccagttttgattaaagcaacagctggcggtggaggcaaaggaattagacaagtaactgatccaagtcaaatggccgaagctttagcggctgctcaaagtgaagctaaaaatgattttggagatgatcgaatgtatctcgaaaaggtaatgcaaaatgtaaagcatattgaggtgcagatttttcgtgatatgtacggtcatacggtttatttccctgagcgtgactgctctttacaacgaaataagcaaaaagttttagaggaaagtccttgcgatttaattacggaaaatgaacgtaaagaattgggtgaggttgcggttaaagctgcccgagccgcaaattatgttaataccggtacaattgaatttttgatggatcaagatcatcatttttattttatggaaatgaatacgcgtattcaggtagagcatactgtaactgaaatggtaaccggtgttgatttagttaaagcacaaattcaggttgcgaatggaggaccactgccttttacgcaaaaagatttacgggctaaaggtcatgcaattgaatgtcgaattaatgcagaggatccagcaaataattttatgccatcaattggtaaagtttcgtacttatatttaccagttggcaatccggggatgcgcattgataccgccttatatcagggacaacaaatttctccttactatgattctatgttagctaaggtagttgctttgggcaatacacggaaagaagcgattgctaagatgaaacgcttacttgaagaaatagttctgcaaggtattactaccaatcaagaatttcatttaaatatactaaatgatccaacttttattaaaggtgactttaacaatacttaccttgaacaaggctttatgccgcaatggaggagtgaaataaatgaaactatttccgcataaaaatactcctactgatacacatattaaagcaaataaagcggctgatgatcgagtacctgatggactgctgcgcaagtgccccaaatgccatcatgaaatatttgcgaacgaattaaataaattctatgaatgtccatattgtttttacggctttagaatctctgccaaaaaaagattatcgtggttagttgatcaagtacaggaatgggataaggatattgagtcctcgaatcctttaaaattccccgattatcaaaagaagatcaaacatgctcaaaaaattagcggcttaaaagaatcagtttggacaggcttagctaagattaaccaaacgcaattcgccttggctattatggatccaacttttattatgggatcgcttggtcaaatgactggtgaaaaattaacgcgtttgtttgaaaaagcaacgcttcagcatttaccagtcgtactgtttgcggcttctggcggagcaagaatgcaagaagggattcttgctttaatgcaaatgggcaaggtatctaatgcagtagctaggcatagtcaagcaggtcttttttatttagtagttttaacagatcctactactggtggggtgacggccagttttgctagtcaaggagatattattatagctgaaccacatgctatagtgggttttgctggtaaaagagtaatcgaacagactattcatgaaaaagtagcggcagatttacaagatgcagagaacgttttgaatcatggttttattgaccatattgttagacgctcacaggaaaaaagaatcattgaatggttaatcaaggtaggtggctatcatgactaaaaatgcaattgatatagttaaagctgcaagagatgaaagtcatatctctggtcatgagatacgcaaacttctttttcccgatttttttgaattgcatggtgatcggtgtggtactgatgatcctgctatagtaggtgggctagctacttttaatcaagagccagtaacagtaattacaactagcagaggacatttacttaaagaaagaattcaaaaacactttgggcagcctgaaccaggtggttatcgtaaagttctgcgtttaatccaagatgcaggtaagtttaggcgacctgtttttttgtttgttgatacagctggcgcttatcctggtaaaagtgcggaagaaaacggccaaggacaggcaattgcacaaaatttgcttaaagttagtcaaatacctactcctattattacggtcatgtatggagaaggcggctctggtggtgctttagcgcttgcctgcggagatgaagtttggatgttggaaaatagtatttattctgttttatcgccagagggctttgcttctattttgtggaaagatgtaaaaagagcaagtgaagcggcggaagtcatgaaattgacgcccgatgatttactcaagatgaatgtgatcgaaggtatcatcgccgaaccggataatcatcaagaggtttgtcaaaatatagcagaaaagctgcaaagtgagataaacaaattaagtaaattatccgaggcagaattgcttgctaagcgatacgaaaggtttagaaagttttagaggtaaaaaatgagtggatttttagcaggaaagaaaatcttggtaatgggtgttgccaataatcggtctattgcatggggatgcgctcaagcaatggaaaaacagggagcaaaaatcatttatacttaccaaaatgagcgattaaagaaatttattagcaaattagttactgatgaagattgcctgattgaatgcgatgtggcaagtgatgagagtattggacaggcttttggtttgattcaatctcgttttggcaaaattgatggcattgttcacgcgattgcatttgctgagaaagaagaattaggtggctcaattttaaattccacaagagagggattcagccaagcagttgatatttcagcttattctttcttggctgctgcaaaagctggaatcaaaatcttaaataatcctgcaagccttgttactttaacctatatgggatcagaacgtgccttgcctaattacaatactatggggattgctaaggccgctttggaatcggaaatgcggtacttagcgcgagacctgggtgaaaaaggtgttcgggtaaatgctatttcagcaggagctatgcgcactctggctgtctcaggaatccagggtcatgcatcattattgaagatttctaagagtaagactgttgatggtgttaatgtgacacaagaagaggtaggtaatacctgtgcttttttgatgagcgatttggctagtgggattactggagatgtaatttttgtagacaaaggtgtacatttacgctaatgcaaatttacaaatatcgaaaggttacttcaacacaagatcttgcaaaaaaatatttagcaaataaagctcaagaaattgctgcatttatagcacaggaacagacggcaggttatggcaagaggggacgctccttttattcaccagctaaaacaggtatttatttaagtattgcgcttcctaattttaagtttaaattagagcatgcaggcttattaacaatagctattggggtagcggtagttcatatactacaagaacaatttccttcgtatgaatttcgtttaaaatgggttaatgacatttatttaaatgataaaaaagtagctggtattctaaccgaaaaaataggattaggtttggtaataggaataggggtgaatatttttacggcatctttcccaaaaaatatctcaaatcatgtcggcagtattgtacaagctgattatgcttttgagaatatgaatgagcagttaattcgagctgttgtgcaggctgctaatacatatcaaaataataaatttttagacgagtatcgcaaaatttcttatctgaaaagtaaagttataactttgaaaataaatcattattatgtaacaggtcgagtagtgacaattgatgatcaaggacggttagttattagttgtcgaaattctacacgttgctattcaagtggtgaagttattaaggtggaattagaacccggatttaagggtaaacagtaaaatagtacaaaaaaagacttgagaagtaatttttctcaagtcttttagtttgtcttaatttaggttaattaaaacttgttcttgtccaaagcaactggagaatctggcttttcaccattgatcatcttcaagttgttgtcaaatgccttaacaaccatgttacgtacagcgtgggtggtgtagaaggcggtgtgtggagttaccaaaacgtttggacgatcaattaagtcagctaaacgcttgtctgggaattctttaccttcccaatcttcgttaaatacaccaacttcgtcttcgtaagtatccataacaaagccaaagatcttacctgagtccaaaccgcggataacagcgtcagtgtcaacaagtggaccacgtgagcagtttacaattacaacgccatctttcatcttggcaattgattcgtaattgatcatgtgtacatttgctggaacatctggtacgtgaagtgaaattacatcagcttgcttgtacaagtcgtcaagtgagtcaacgtagtaacccttcttttcgagttctgggttcttgaagatatcgtaagcaatgacctttgcgccgaaaccttccataattctcataaatacttgaccaatgtgaccagtacctacaacaccaacaacttggtcacgaacttcacgaccaatagtaggtgcccaacgtaagtcgcgcttagccatcttttcgtccatacgcttgtcttgacgtaatacacgagcagcttggattgcagcatgttcagcaatagcgtcaggagagtatacaggaacgttagtaatttcaaagccaagttccttagccttgtccatgtcgatgttgtcgacaccaacgttacgtaatgacatcttagttacgccagcgtctgccaatgcttgaagagtttctggggtgtagtctaattgttggtaaacaacaacaccgtcagcacccttagctaacttagcagtttcaggagtcaaaagcttatcagtgtaatctacatcgatatccttgtgagcatccttccattcgtttaagaatggttcttcgtctttacgaatagcgtaagcaaaaatctttgtcataaatttaacctccgtaaaatttattagtatgaccagtcctcattatacgcttttacttgctcaacaaaacacaaaagaaccatttttttgtatagattttaagaaaaataaaagtcaagttttactctgagcaaaaaagttgcaattttttcaaaaaaagtttatagcctaaaaattgcaactattattaactgttacctaatctcaatcccatagatatgaaaattatttttgtatatagcaatattagttaaaggtagtatatggatttgtataagagacgcattttcgttatataacccaggttatataatggactttaagtagagaaacaaacatagcggaggaaaattgaatatgcattttaaaggagaaagccaacagcatttcagcctaagaaagctgacaattggtgttgcttctgtaataatcgggaccacctttatgttttttggtggtcatgctgttcatgcagatgatttaagtagagatgctgagcaaaccagctcagttgttcaaaaacagagtagtgagaaaatagatgtagatgcagtcaaagaagctgataatgtttcaaatcaaagacaagacttacccagacggtactaagagtaccgcaactgttcctgtaactgtcattgcaccaaatgtaccagacgttatctacgtaccaaagggtgacaagtttccagacccaagtactgtagttactaactctaacgatatcaaggacaagattcctgacacgacttacacttggaaaactactccagatactccaaatactaaagtagtaattaactataaggctaataatcctggtactccagataccccagttactccaccagtggatccaggcgataatccagcaaccccagttaccccgcctgtaaagccagagcagaagccaacaacaccaactcctcatgctactaagacaccagcaaaggataatggtggcaagaagacagtagctagtgagcaaaaatctactttgccacaaacggggaagaaggataacgttgctttgactgctatcggtgtagctattgcagctgctggaagcttattaggattagcagatagcaagaagcatagatcttaatttgtaatatctaatttctgtttactaagaagcaagttgactcagataggagctagcttgcttttttgtctaaaagtttaaggatttctaaagacaaaaagcaaatagtgacgcattgtcataaagctgatattatatactcataacaaaaatacaacgcatcaaatagagatgaattgtaagaaggtaacaaatcttctaattccttattaatacatcctattgggcctttattaattcatacattgggtattgctttttgctggttgtcccctatgcaaccgcgaaagttaagattgataataagtccatcccctttttgcgaaggtaaagagtcaagaccccctgcaacatctcttgcgttgaatcttttgttaatcttgataatttatcttcgcaacattagtgatgagtaggctaatgtaaaaaaatctcgttattctcattcaacacaactcccttaaaagggctggtttagaaaagtcatctaaatcagtcctttttctttttttcgttataattaaacttgagaactaaaacaaaggggaagaaaaatgatcttaatttcatggaatatcgattcattaaatgcagctctgactggtacttcagctagggcggaagaaacgcggcaagttttaactaaaattcatgatgccaatccagatattattgcgattcaagaaactaagctgcgtgcaactgggccaactaaaaaacataaagaagtgttggctgaaaagttccctgagtatgactatgtttggcgctcttcagaagaaccagctagaaaaggctatgctggtacaatgtatctttataagaaaggattaactcctgcagtgtctgagccgattattggcgcccctgagccgatggatcatgagggacggataatcacactggaatttgataaatgctttgtcacccaggtttatacgccaaattcaggcagtggtttaaagcgactagctgaacgtcaagtttgggaccaaaagtatattgaatatctgcaaaaattagatgaaaaaaagccagttttagctagtggtgattacaactgtgctcataccgagattgacttgaagcatcccgaaaataatcatcactcagcaggttttactgatgaagaaagagtcgactttaccaatttgctcaatgctggctttaccgatacctttagaaaagttcatggtgagattactggcgtatattcttggtgggctcaacgtgtcagaaccgctaaggctaacaactctggctggagaattgattactggctagtaagcaatcgcattgctgataaggtggtccgctcagagatgatcgatacaggcaaacgagcagaccactgcccaattttgcttgaaataaatctttaaattgaagcaagccctagtataatttctttttgaaatgtttttattttgaaaaagaagtaggggttgaaattctttgaataacgagaaaaaagaagattgggctttggagcaggatctgaagtacaatcgtctgacagcatttaagctattcgcgatgactagttcaatggttatttccgttgatgaactcgcaccatttggtaaaactggagcaacggcactgttttacttgttaattgctggaatcgcttggtttatcccgattacgcaaatggctggagaaatggcctcaattgatggctgggaaaaaggcggaatcttcacttgggtgaaaggatctcttggagacaaaacaggctggacagcaatgttttatcaatggattcatattactgttggtatggatacgatgatgtatgtgatcattggggcattgtctatcacatttgggacaccttggttcaacaccacgccaatcgtacgcttcattttaatgatggttattctgtggggagcaacagcgattcaggtaattggtgttagaaagattggtcgaatcgctgaatggctgtttattctggggattgcgacaccagtaattttattgattatttcattcttcgtatatgtgattcaggggcatcccttgcatatgacgattaactggaatactgtaattccacataaattgaatggtaatacattagttgcctttgtcccatttatgttggccttttgtggtggggaagcttctgcaccgcacgttaaaaacttggaccacatcaagtcatactcaaaagttatgcttggcttagccgttactgcaatctgcttcgacttgctaggtagtatggcaattggaatgactgtgcctaaggatcaaatagagaacagtacaggctttgtttatacctatggcaagctgttaacgtcaatcgggctacctggtgatctgttgcaaaaaattgtgggtataatgttagcctgcggtattattggtgagctaggcaactggattgctggtcctaatcagggaatgtatgaagcggctaaagagggctatatgcctaagttttttgctaaaaccactaagcacggcgtgccattaagaattatggttttacaatcaagtatcgttaccatttctgcattattgattacttttaccagtggtgccgatgcagattttgcgtttaacgtttcattggccgcaacgacggcgcaatatctcatggtttatatgattatgttgattgcttacatggttttgaaaagaaagcatgaagattatcaccgtatgtattacatgagcaagaaccctaatttgagtattgcaattgcggtgcttgcattaatcatcacggttatagctttctttgtaacttttgttccagcacaaggcacgccaagcaatttgcgtcacgtttatgtttggaccttaatcggcatgtgtgccattgtgtcgattttgccacttattttgtatcgctggcatgaaaaatggcaatcacaatagaattaagaagcattcgtttttcaagacggatgcttttttagtagaatttgagagaggtgaataaaatggcggatgcgatgagggatgcaatattaaatggttttgttgatcaaaattatttaggaagtgaagaattaggtcctaaaatattagctaataatcagcaagagagaatctggcagaatttgcgccaggaattgtatagttgcaagtcctttacttgggcggttgcgtttattacgcaagacatgctagttccgtttaaggtgataatggcagatttagcgaaaaatggaattagtggcacgattattactggtgattacttgggttttaacaatccgcgtgtttttacggaattacaaaagattcctaatttagaagttcgtattgctaataaggcaggtttccatactaaaggatatttatttgatcatgaaaactatcaaactgtgattattggcagtgctaattttacacgttcagctctgctggctaactatgagtgggctttgaaagtaagttcaaaaaagcaagcagatttaacagctcaattagtggataaaattgcagatttgaaacaggatagttttgttttaaattcagcctggctaacagattatcgtaaaaattgggtaaagcctgagcgagttgctactgatcggcatcagacaaaaattttaccaaataaaatgcaaaaagcggctttaaaacagatagaagcactagttacaagtggtgaaaaacgagggctagtagtgtcagccacaggaacggggaaaacttatttaggtgcttttgctgttaagaaatatcagccgcggcgttttttatacattgtgcatcgtgagcaaattgctaaaaagtcattagaaagtttttatcgtgtaatcggtggaccaagatcggattatggcttattaacgggaaataggcacaatttacaggccaagtatttatttgcgacggtacaaacgataagtcaacctgagatgctggctaattttaatagcgatgaatttgattatatcttgattgatgaagcacacagggcagctgcaccttcatatcagcgccttttacattattttaagcccaatttttggttaggaatgacggctacgcctgaacgaatggatgagcaaaatgtttaccagatttttgactacaatttggcatatgaaattcgtttgcgggatgcactggaagagaagatgctggcgccatttcattatgtgggtgtccaggattatgaagcagacggagtagtgattgatgaaacaacagatttacgctacctagcttctacatctcgagtagactatgttttaaaggaattagactattacggctattgtggaacaaaggctaaaggcttggttttctgcagtcgacaggatgaagcacgtgaattagctcggctttttagtcaaaaaggacatcccgctgtagcattgaccaatgaggataatgaaaaaagacgtaatgaagtggttgcgtctttagttaaaggtgagattgagtatattgtagcggttgacttgtttaacgaaggaatcgacatccctgccttgaatcaaattgtgatgttacgcaacacacagtcgagcatagtgtttatccagcagttaggccgggggcttcgtaaatatcctggcaaagattttaccgttgtgctagattttatcggcaattataaaaacaattacatgattccgttggcactgaatcaggatacttctcgaagcaaagatcaagctaaacgagaaacgcgtctgccaagctttattgatgtttcaacgattaactttagtaaaattgccagtgaaaaaattttggcttcgcttgatagtgtcaagcttgatgggatgcgtgaattgcggcagagttaccatgatctcaagaacaaactagggcgtgtaccgctactatttgatttttatcaatatggctcagttgcaccgattgtttttgcacaaaatcatggcttggcaagctatgctgactttttgggtaaaatgggcgaagacgttaatttatcaaaatatgaaaatgaagtgctgtcttttgtgactaaggaattacttaatggtaaaagaattcacgagttacttttgttagagatgctacttgaacaagatattgttaagcaagaagattatctagctcaattgaaacgacaccatgcttatgtaaatgatgaattgttagcttctgttgatgcgattttatcgctagatttttttgatattaagcagggaaagactaccaaaaaagcacaatatggtaaattgccgttagttgaacgtagcaatttatttgactatcaattgaatggttctctacgctctgccctagatcaacatgattttaagaatttatttgttgatgctattaaaactggtttggccttaaatcaggaatatgataatcagcgtcaatttactttatatcagcaatatgatcgtaaggacgcttgtcgactcttgaactggcctaaggatgtttcggccccgatgtatggctatcgtgttggtgagcaggacacaccaatcttcatcacttatcataaagatgatcatgaaaagcggaatgctctgtatcgtaatacattggctgatgggcgcagtttgcgctggtatactcgggtaccacggcatttagattctgatgaggtacagcgtttgcttaatacgcgagggatgaatttgcatatatttgttaaaagaagcgatgcagatggtaagcagttcttttatttaggcaaggcaaagattcaagctgattctgttcgcgaagaattgctcggtgttaagaaaaagccagctgtagggatgaacttaatgttgaaacatccactgagtgagtcaatgcatgagttattatttgaatagaccaaaaaagcctttccgcttaggaaaagcttttttaattgccgctaatattaattagatcttggtcatcttggttattatccttatcaaacattctaggcttgatgtgatctagaatcttagtcccgatatttttctgagcagtttcatcaccgctaacctggtttaaaaacataattattccatatcgattatctgtagtcattttgatccaattaccaaaatgagtgttgcttaagctaccataagcagatttagtatggtcatcatctaaatgaagccctccagaataattagtggttgcacttttaagatgagttaagtaatagaaatcggatttgcttaagatactaccattggttaagccaagctggatcttgtaataatccattggggtagtgaacatattgcctgcgcctggaagctgggaggcaagagtctttttaacgtattcagcgtcttggtaatttttaccattattccagacgtaagagataggatcggttttccaactaggaatatcctgataaaggaatgtattagcaagccctaatttgttaatgatgcgattattgaaattgttttcgtaggattgtccgctgattttaataataattccggctaataaaagatagttggtattattgtagaagtaggttcctggtgtcccttgagtgccgttattagtattatcaatagcccaattgatggcgtcattctcacttaaaacttttccgcgatccaattcagtattggttgcttgaatgccagaagtatgggtcattaactgtccaatagtaatattatcggcgtttttaagattagggtaccaacgtgaaattttggtgttttgcgtaaatttttgactagtgtgccagttttcattcatcagctgaattatcattgctgctgtaacaactttttgcaaagaagcagttggataaactacgttgtcgttcccattaccaacttttttaccgtaccaagcgtagccatagctgatttgttgcggctgaccgtttttgataatgacgatactaccgcgagtattgttttgagccaaagtattgcggacaaaatttcgcatttcggttttaaagtatgaactggcttgaacttgtggtggttcagtgatcgcaaatgcaggaactgtcgttagcagcgcagcggtagctagtccaataattgattttttcaaaaattaaaaggcctcccttaaaaagtggtttgtttacattttagcgcgttctttgcatcggacaaactattatcttggtgaaaagacgtatttttagctagcttgttgaaaaagtgcggctaattttgctctgagtgcgggatcatgagcgtataaataggtaccgcggattcctcgcttgaatagaacgttgagtgaattcatgaccatcttctcttcatattctattttttcttttgagttggttagatcattacgctttttgaacatctcaacatctgtaattttgtctaaattaactttaagttgattggtgcggggaatcaggctgattggtggaccgataatgatgccagcataatttaggtcaaaaccttggcaagtatagatagaaccaacttcattgattgttgtaggaatttctgcccaaggagttgatgtgtagttgtattgatcccatggcagcataaatttcccttctttaatgtaatgtttgccaccatcaagagtagatggatagccggaagttgaaagaattcttgccaggccgtctgtttgatttctcttgacgatttcttgccgcattttttctgcatcagtaaaaatacgaaagtcgtagttgtgccacatttctttttttaagggcattaatttattatgtgtaaaaaagttaaaccattctattagactatctggtgccatcattctaaattgatgatgtagttgatagtcttcgtggggataatgatgagtaattgcttcaagtcgcttacgtgtccagaagcttttcattcgtaaaacttggttttcatcaaataccaaaatgataacttttgaccgcttaataacctcctctaattggttatcgtgataaaagttgttgtagtgatcaggctgagataagagcaagtgtgcttcatcaatgacgacaacatcagcactggtttgttttttgtccatctgattaataaatgaagttggccgcatataatttttcttatatagttctttaatcggcccagcaatctgcttatagacttttagcagttcagggtgatttactaaaaagtagttttgagttttatacagttggctgcctgtttggtggtttaatttttgcaactgatcaaaaagggcagaaagcactacacttttaccagtacctgcttcaccataaatagtgaaaacagcaggatgatttttattgctgcaatgtgtaatcgaaaaatgtaaaattttttgtacgagaagtgattgctcttggttgagctgatggtaaggagagagtttaaaacttgcttgattattcaatatttattcacctcgttttcaattataatgaatagaaataataatgataaaggaagaaaacatgactgcacaaaaaataattcacaatcggctatttttaagacaaaaatctgatttagctggcaaaaatgatttacaagttgcgataaacttgcgtgatacgctactagctaatcgtgggaaagctgcggggctggctgcaaatatgattggtcagactaaacaaattattgcgttttatgctggcccgcttccatttgtaatgctgaatccgcgtattattcaaaaaaagcagatgtatcttgctagtgagggatgtctgtcactagaaggcgagcgtaatgttcagcgctatgaagaaattactgttacttatcagaatatggagttagaaacagtaacgcaaacttttggtgactttatagctgaaacgattcagcatgaaattgatcattgcaatggaattctgatttgaatagtagaatatttacgtgattttgcaaaaaaagtaaaaaaatttaaattaattttgcatggtttcagggatgaaaacccacaattttcgaataattagatttgatagaataaaatactttttaatttaatgcaaagataaagaaaaatatattacaacactacctagtgtatcgtgaagaacccgaacgaagagcaagacttgccaaagcggagaaaataaggtaaattaataaagtcgcttcgagagatgcgacgagagcttaaaaacagacatgcaaggaaagaaaacaaataaaaagaaaaaagtacttgcaaagaagtaaataagctggtaatatatttaaatgtcgtcaggtgaaagcagaaaaagcttgagtaagacgaaaaaacaaatcaaaaaagttcttgacaaagaaatgatggtttgataaaatataaaagctgtctgctttgcaaaaaaagcaagacagaggtagtactttgaaaactgaacaaagtttcgctaaaagtgtgcgggtgtaaaaacccaaacaagaagcgaagtcaattcgcaagcaataaatttgagacaaagatcttaaataaggaatgagcaatcattcaaactttttaaaatgagagtttgatcctggctcaggacgaacgctggcggcgtgcctaatacatgcaagtcgagcgagcggaactaacagatttacctcggtaatgacgttaggaaagcgagcggcggatgggtgagtaacacgtggggaacctgccccatagtctgggataccacttggaaacaggtgctaataccggataagaaagcagatcgcatgatcagcttttaaaaggcggcgtaagctgtcgctatgggatggccccgcggtgcattagctagttggtaaggtaaaggcttaccaaggcgatgatgcatagccgagttgagagactgatcggccacattgggactgagacacggcccaaactcctacgggaggcagcagtagggaatcttccacaatggacgcaagtctgatggagcaacgccgcgtgagtgaagaaggttttcggatcgtaaagctctgttgttggtgaagaaggatagaggtagtaactggcctttatttgacggtaatcaaccagaaagtcacggctaactacgtgccagcagccgcggtaatacgtaggtggcaagcgttgtccggatttattgggcgtaaagcgagcgcaggcggaagaataagtctgatgtgaaagccctcggcttaaccgaggaactgcatcggaaactgtttttcttgagtgcagaagaggagagtggaactccatgtgtagcggtggaatgcgtagatatatggaagaacaccagtggcgaaggcggctctctggtctgcaactgacgctgaggctcgaaagcatgggtagcgaacaggattagataccctggtagtccatgccgtaaacgatgagtgctaagtgttgggaggtttccgcctctcagtgctgcagctaacgcattaagcactccgcctggggagtacgaccgcaaggttgaaactcaaaggaattgacgggggcccgcacaagcggtggagcatgtggtttaattcgaagcaacgcgaagaaccttaccaggtcttgacatctagtgccatttgtagagatacaaagttcccttcggggacgctaagacaggtggtgcatggctgtcgtcagctcgtgtcgtgagatgttgggttaagtcccgcaacgagcgcaacccttgttattagttgccagcattaagttgggcactctaatgagactgccggtgacaaaccggaggaaggtggggatgacgtcaagtcatcatgccccttatgacctgggctacacacgtgctacaatgggcagtacaacgagaagcgagcctgcgaaggcaagcgaatctctgaaagctgttctcagttcggactgcagtctgcaactcgactgcacgaagctggaatcgctagtaatcgcggatcagcacgccgcggtgaatacgttcccgggccttgtacacaccgcccgtcacaccatgggagtctgcaatgcccaaagccggtggcctaaccttcgggaaggagccgtctaaggcagggcagatgactggggtgaagtcgtaacaaggtagccgtaggagaacctgcggctggatcacctcctttctaaggaagcgaaggatatggagagcaggaatgctaagagaagtatccagagcaagcggaagcacactgagaaactttgtttagttttgagggtagtacctcaaaaagagctagtacattgaaaactgaatataatccaagcaaaaaaccgagacaatcaaagagaacagattgtagagcgaccgagaagagaattcttgagtaaggtcaagtagaaaagggcgcacggtgaatgcctaggcactaacagccgaagaaggacgtgacgaactacgaaaagcttcggggagcggtaagtacgcagtgatccggagatatccgaatgggggaacccaatgcagagatgcattattgattagtgaatagatagctaatcaaaggaagacgcagtgaactgaaacatctaagtagctgcaggaagagaaagaaagatcgatttccttagtagcggcgagcgaagaggaaagagcccaaaccaagtgatttatcatttggggttgtaggactgcgacgtggcagtgtaagagatagttgaattatctgggaaggtaagccagagagggtgagagccccgtaagcgaaatctcaagcacgcctagcagaatcctgagtaggccgggacacgaggaatcccggttgaaaccgcgaggaccatctcgcaaggctaaatactagttagtgaccgatagtgaaccagtaccgtgagggaaaggtgaaaagaaccccggaaggggagtgaaaaagaacctgaaaccgtgtgtctacaagtagtcaaagcacattaaagtgcaatggcgtgccttttgtagaatgaaccggcgagttacgttatctagcgaggttaagtcagaaaagacggagccggagcgaaagcgagtcttaatagggcgaaaagttaggtgacgtagacccgaaaccaagtgacctacccatgaccaggctgaaggtgtggtaaaacgcactggagggccgaacccacgtaagttaaaaattgcggggatgagttgtgggtagcggtgaaattccaaacgaacttggagatagctggttctctccgaaatagctttagggctagcctcgtggagaggataatggaggtagagctctgtttggactaggggcccgtcaggggttactgaatccagataaactacgaattccagatatccatacacgggagtcagactgcgagtgataagatccgtagtcgaaagggaaacagcccagatcaccagttaaggtccccaaatctatgctaagtggaaaaggatgtggagttgcgtagacaactaggacgttggctcagaagcagccatcattcaaagagtgcgtaatagctcactagtcgagtggcgctgcgccgaaaatttaccggggctaagcatagtaccgaaactgtggatgtgttttaaagagcacgtggtaggagagcgttctaagagcggagaagttgaatcgagaggatcaatggagcgcttagaagtgagaatgccggtatgagtagcgaaagataggtgagaatcctatccgccgaaagactaaggtttcctggggcaggctcgtccgcccagggtaagtcgggacctaaggcaaggccgagaggcgtagtcgatggataacaggtagagattcctgtactgtgtcaaatcgttaagagcgaaggagggacgcaggaggtgaagcacgcatcgcgatggaacgatgttcaagcaacaagtgcggttaagagtcaaatgcttctaaccagcaacacgagttgtgaagaggagtgaattaaaagtagcgaaggtgtggtaatcacactgccaagaaaagcttctagccagagatgacatacccgtaccgcaaaccgacacaggtagtcgagtggagaacactaaggtgagcgagagaactctcgttaaggaactcggcaaaatgaccccgtaacttcggaagaaggggtgctagccaagagattggttagccgcagtgaataggcccaaacaactgtttatcaaaaacacaggtctctgcaaaatcgtaagatgacgtatagaggctgacacctgcccggtgctggaaggttaagaggagagcttagcgtaagcgaaggtttgaattgaagccccagtaaacggcggccgtaactataacggtcctaaggtagcgaaattccttgtcgggtaagttccgacctgcacgaaaggtgtaatgatttgggcactgtctcaacgagagactcggtgaaattataatacccgtgaagatgcgggttacccgcgacaggacggaaagaccccatggagcttcactgtagcttgatattgagtatcttttaaacatgtacaggataggtaggagccagagaagataggacgctagtcttattggaggcaatgttgggatactacccttgtttgaaggatgctctaacctcgacctgtaagccaggccagggacagtgtcaggtgggcagtttgactggggcggtcgcctcctaaagtgtaacggaggcgctcaaaggttccctcagaatggttggaaatcattcgcagagtgtaaaggtataagggagcttgactgcgagagagacaactcgagcaggtaggaaactaggacttagtgatctggtggtaccgtatggaagggccatcactcaacggataaaagctaccctggggataacaggcttatctcccccaagagttcacatcgacggggaggtttggcacctcgatgtcggctcgtcgcatcctggggctgaagtcggtcccaagggttgggctgttcgcccattaaagcggcacgcgagctgggttcagaacgtcgtgagacagttcggtccctatccgtcgtgggcgtaggaaatttgagaggagctgtccttagtacgagaggaccgggatggacgcaccgctggtgtaccagttgttccgccaggagcatcgctgggtagctatgtgcggaagggataagcgctgaaagcatctaagtgcgaagcccccctcaagatgagatttcctttgcgtaagcagtaagacacctcagagacgatgaggtagataggctgggagtggaagtcctgtgaaggatggagcggaccagtactaatcagtcgaggacttgaccaaagcgaagcaaactggaaggttttttgcgagaaggattatgtttagttttgagtgtaaaagctcaaaagagtacggtggcgaaagcaagaaggatacacctgttcccatgccgaacacagaagttaagcttcttaacgccgaaagtagttggtgggcaactgcctgcgaggaaaggaagctgccgtgctcttttttaatattccggcttagctcagttggtagagcgcttgactgttaatcaagatgtcgtcagttcgagtctgacagccggagtaaaggggagaaggaagcggaagacttcttttttgtgccttttgggtatgttaaaaggctaattaggctaagcaagcatgacttgagggtcaaatttaatataatcattaatagaagacatagtaaaattcctaacaagcttaattgaattgattacggaggctatgctctctttttaagtgcataaaaatcttatagagagatacgcgtggtgctagttaaatcgttctagacaataagccaaattataagctaaaattgcaatttccaaccggctttgaaagcctatcagactacgtgctcgattgttctcggcattgtaataggtcagaagcgaaaagtcgctttcaattgttctgcgaatagccatcaattgatgatcattgtgctttttagctcctgtcatatttttacgatatggtgtccaaagttcataacccatttgttttagctgttgatgcagttctttgcctaaatagccttcgtcgccaagaagatagtaattagatggatgggtattttccatcagttcaactgtctccctggcatcatgaactgatgcttttgttacgacataatcaagaatgtaaccgtcatcgctaacaatgacatgaactttgaaaccatagaagtaaattttcttggtggccttataaccaatgttggcataaccgcgaaaaattttagcacgatagttgcgaattggttggcaaacaggtaccggaaagctgtcaatgatcaagaactgtccattcaggtcaacctttttattcatttcttgccgtatctgataaatcaattgcaatagctgacgtgaacgtcgattaaaacgtgagtgtgataaacaattgaaacattcacagaatcttctttgtgattcaattcctgtcttagcttgccagataagtaaagccaaaatcagactgtccgtagttttaatttgatcaatatttcgccgatgagtaaactcagccggtgcatacaaacgataccagtgccgacaaattatcactaaatctttaaaactaacttgtaaatggtggctaaaacgcttaagcttaaggcagttcaatcagatcagactcttttctattattactatttacaagtcgagtctaacaagattggacttttttattaactaaaacgatttaactagcaccacgcgtagatagattattataaatacgcgtggtgctagttaaatcgttctaggcaatatgccatattataagctaaaatggctatttctagccgctgctgaaaaccagctaagcaaagaaaagtcgctctcaattgttcttctaattgccatcagttgatgatcgttatgctttttagcgcctttcatgtttcttcgatatggtgtccaaaggacatagcccataccttttaactcggcagttaagtcttttcctaagtagccttcatcgcctaaaagataatggttaattggatgagcattaatcatcaattctgtcgtttctttggcatcatgcactgatgctttagttcaagtacatagccatcatcgcttactagcgcgtgaaccttgaagccgtaataatagatttttttagtggctttctagccgatatcagctatgccacgaaagatcttgacgcgatagttgcggataggctgacaaactgggaaactgtcaataattaagaattctccagctgtttttacttcttgattccaatcttgacggatacagcgcattaaaggcaaaagcattcgtgcccgacgattaaagcgagaatgagacaaaccgacaaagaatttacaaaatcttctttgagattcgataccaatttcagtttgccaaataagcatcgctaagatggagctgtcagaaattttaacctgatcaacatttttacggtgcttcaattcatcaggagcacaaagcttgtacaaagaacgacaaattacatttaaccgagcaaagctaacttgtaaatggtgagaaaaacgattaagcttgagatagttcaattagatcggactcttttctatttaatttaagttacaacttgagtctaatccgattggacttttttattaactagcaccacgcgtttataaatattcaacgacagtaaaattaggtaagcaatctatatctaggaatctgttggggttctgattgtagtaggctaattatacaaaaatgagttaacaaaattctgatcagaattagtacggttaagattgaaaaaatagctggtaattattactgtatctctttgtaattaggtagcaatgctattttttacttctaaaatataattaaaccggtcagacaattcgtattgatctgaatttggataaacagttataacaaaactatgtgtgcaaagcagatgacagggacttttaattgatctcgtatgttggagcgcgctgtgttgactatttgttctaagtgaacagatgataagtatgcctctatctaagtaccaagatctaggaaattcattctgaagtagttaatatgtgtcaatatgtcgcacaaaggtaactatgaattacagcaacataagagaaatttgaaaaatagtttttaaattgtggcttgttattagtgaaaatgataaattaaatattattttggcagaaaatacagcttaataacaaaaaataaaaatattttttgcttacctttaaaaatatagttcgagatttataaagtttttaacgagttaaagtgatatttctataattgaaagcagattctactaatgtaattactataatcagaataaatatttcataaaaatacatagaacccgaacgaagagcaagacttgccaaagcggagaaaataaggtaaattaataaagtcgcttcgagagatgcgacgagagcttaaaaacagacatgcaaggaaagaaaacaaataaaaagaaaaaagtacttgcaaagaagtaaataagctggtaatatatttaaatgtcgtcaggtgaaagcagaaaaagcttgagtaagacgaaaaaacaaatcaaaaaagttcttgacaaagaaatgatggtttgataaaatataaaagctgtctgctttgcaaaaaagcaagacagaggtagtactttgaaaactgaacaaagtttcgctaaaagtgtgcgggtgtaaaaacccaaacaagaagcgaagtcaattcgcaagcaataaatttgagacaaagatcttaaataaggaatgagcaatcattcaaactttttaaaatgagagtttgatcctggctcaggacgaacgctggcggcgtgcctaatacatgcaagtcgagcgagcggaactaacagatttacctcggtaatgacgttaggaaagcgagcggcggatgggtgagtaacacgtggggaacctgccccatagtctgggataccacttggaaacaggtgctaataccggataagaaagcagatcgcatgatcagcttttaaaaggcggcgtaagctgtcgctatgggatggccccgcggtgcattagctagttggtaaggtaaaggcttaccaaggcgatgatgcatagccgagttgagagactgatcggccacattgggactgagacacggcccaaactcctacgggaggcagcagtagggaatcttccacaatggacgcaagtctgatggagcaacgccgcgtgagtgaagaaggttttcggatcgtaaagctctgttgttggtgaagaaggatagaggtagtaactggcctttatttgacggtaatcaaccagaaagtcacggctaactacgtgccagcagccgcggtaatacgtaggtggcaagcgttgtccggatttattgggcgtaaagcgagcgcaggcggaagaataagtctgatgtgaaagccctcggcttaaccgaggaactgcatcggaaactgtttttcttgagtgcagaagaggagagtggaactccatgtgtagcggtggaatgcgtagatatatggaagaacaccagtggcgaaggcggctctctggtctgcaactgacgctgaggctcgaaagcatgggtagcgaacaggattagataccctggtagtccatgccgtaaacgatgagtgctaagtgttgggaggtttccgcctctcagtgctgcagctaacgcattaagcactccgcctggggagtacgaccgcaaggttgaaactcaaaggaattgacgggggcccgcacaagcggtggagcatgtggtttaattcgaagcaacgcgaagaaccttaccaggtcttgacatctagtgccatttgtagagatacaaagttcccttcggggacgctaagacaggtggtgcatggctgtcgtcagctcgtgtcgtgagatgttgggttaagtcccgcaacgagcgcaacccttgttattagttgccagcattaagttgggcactctaatgagactgccggtgacaaaccggaggaaggtggggatgacgtcaagtcatcatgccccttatgacctgggctacacacgtgctacaatgggcagtacaacgagaagcgagcctgcgaaggcaagcgaatctctgaaagctgttctcagttcggactgcagtctgcaactcgactgcacgaagctggaatcgctagtaatcgcggatcagcacgccgcggtgaatacgttcccgggccttgtacacaccgcccgtcacaccatgggagtctgcaatgcccaaagccggtggcctaaccttcgggaaggagccgtctaaggcagggcagatgactggggtgaagtcgtaacaaggtagccgtaggagaacctgcggctggatcacctcctttctaaggaagcgaaggatatggagagcaggaatgctaagagaagtatccagagcaagcggaagcacactgagaaactttgtttagttttgagggtagtacctcaaagatttgaaaaacgccaagcgttagtcgggcctatagctcagctggtttagagcgcacgcctgataagcgtgaggtcgatggttcaagtccatttaggcccattgacataacgaagaaaaagagttaaagttatgtctggccgaaaataaaatactctgggggcttagctcagttgggagagcacctgctttgcacgcaggaggtcatcggttcgaacccgttagcctccattgatccagaaaaaggatcaaagagctagtacattgaaaactgaatataatccaagcaaaaaaccgagacaatcaaagagaacagattgtagagcgaccgagaagagaattcttgagtaaggtcaagtagaaaagggcgcacggtgaatgcctaggcactaacagccgaagaaggacgtgacgaactacgaaaagcttcggggagcggtaagtacgcagtgatccggagatatccgaatgggggaacccaatgcagagatgcattattgattagtgaatagatagctaatcaaaggaagacgcagtgaactgaaacatctaagtagctgcaggaagagaaagaaagatcgatttccttagtagcggcgagcgaagaggaaagagcccaaaccaagtgatttatcatttggggttgtaggactgcgacgtggcagtgtaagagatagttgaattatctgggaaggtaagccagagagggtgagagccccgtaagcgaaatctcaagcacgcctagcagaatcctgagtaggccgggacacgaggaatcccggttgaaaccgcgaggaccatctcgcaaggctaaatactagttagtgaccgatagtgaaccagtaccgtgagggaaaggtgaaaagaaccccggaaggggagtgaaaaagaacctgaaaccgtgtgtctacaagtagtcaaagcacattaaagtgcaatggcgtgccttttgtagaatgaaccggcgagttacgttatctagcgaggttaagtcagaaaagacggagccggagcgaaagcgagtcttaatagggcgaaaagttaggtgacgtagacccgaaaccaagtgacctacccatgaccaggctgaaggtgtggtaaaacgcactggagggccgaacccacgtaagttaaaaattgcggggatgagttgtgggtagcggtgaaattccaaacgaacttggagatagctggttctctccgaaatagctttagggctagcctcgtggagaggataatggaggtagagctctgtttggactaggggcccgtcaggggttactgaatccagataaactacgaattccagatatccatacacgggagtcagactgcgagtgataagatccgtagtcgaaagggaaacagcccagatcaccagttaaggtccccaaatctatgctaagtggaaaaggatgtggagttgcgtagacaactaggacgttggctcagaagcagccatcattcaaagagtgcgtaatagctcactagtcgagtggcgctgcgccgaaaatttaccggggctaagcatagtaccgaaactgtggatgtgttttaaagagcacgtggtaggagagcgttctaagagcggagaagttgaatcgagaggatcaatggagcgcttagaagtgagaatgccggtatgagtagcgaaagataggtgagaatcctatccgccgaaagactaaggtttcctggggcaggctcgtccgcccagggtaagtcgggacctaaggcaaggccgagaggcgtagtcgatggataacaggtagagattcctgtactgtgtcaaatcgttaagagcgaaggagggacgcaggaggtgaagcacgcatcgcgatggaacgatgttcaagcaacaagtgcggttaagagtcaaatgcttctaaccagcaacacgagttgtgaagaggagtgaattaaaagtagcgaaggtgtggtaatcacactgccaagaaaagcttctagccagagatgacatacccgtaccgcaaaccgacacaggtagtcgagtggagaacactaaggtgagcgagagaactctcgttaaggaactcggcaaaatgaccccgtaacttcggaagaaggggtgctagccaagagattggttagccgcagtgaataggcccaaacaactgtttatcaaaaacacaggtctctgcaaaatcgtaagatgacgtatagaggctgacacctgcccggtgctggaaggttaagaggagagcttagcgtaagcgaaggtttgaattgaagccccagtaaacggcggccgtaactataacggtcctaaggtagcgaaattccttgtcgggtaagttccgacctgcacgaaaggtgtaatgatttgggcactgtctcaacgagagactcggtgaaattataatacccgtgaagatgcgggttacccgcgacaggacggaaagaccccatggagcttcactgtagcttgatattgagtatcttttaaacatgtacaggataggtaggagccagagaagataggacgctagtcttattggaggcaatgttgggatactacccttgtttgaaggatgctctaacctcgacctgtaagccaggccagggacagtgtcaggtgggcagtttgactggggcggtcgcctcctaaagtgtaacggaggcgctcaaaggttccctcagaatggttggaaatcattcgcagagtgtaaaggtataagggagcttgactgcgagagagacaactcgagcaggtaggaaactaggacttagtgatctggtggtaccgtatggaagggccatcactcaacggataaaagctaccctggggataacaggcttatctcccccaagagttcacatcgacggggaggtttggcacctcgatgtcggctcgtcgcatcctggggctgaagtcggtcccaagggttgggctgttcgcccattaaagcggcacgcgagctgggttcagaacgtcgtgagacagttcggtccctatccgtcgtgggcgtaggaaatttgagaggagctgtccttagtacgagaggaccgggatggacgcaccgctggtgtaccagttgttccgccaggagcatcgctgggtagctatgtgcggaagggataagcgctgaaagcatctaagtgcgaagcccccctcaagatgagatttcctttgcgtaagcagtaagacacctcagagacgatgaggtagataggctgggagtggaagtcctgtgaaggatggagcggaccagtactaatcagtcgaggacttgaccaaagcgaagcaaactggaaggttttttgcgagaaggattatgtttagttttgagtgtaaaagctcaaaagagtacggtggcgaaagcaagaaggatacacctgttcccatgccgaacacagaagttaagcttcttaacgccgaaagtagttggtgggcaactgcctgcgaggaaaggaagctgccgtgctcttttttaatattccggcttagctcagttggtagagcgcttgactgttaatcaagatgtcgtcagttcgagtctgacagccggagctagcggaatatgaaagaggcgggggccagaggcttccgcctttttgtgtgctattaaagttctataattaagcttttctaagtcttgaaatttttttaaatagggtttccaaggaactttgaggagtttgtactctgaatggtattgatggatacgttattttttctgccggaaagccacagaatggacaagtgggctgctttaaaagggcttcgtagactttgtattgcactccattgaagaatttatagaaattgttgtaaaaaacgatatttttatctttaatatcgagatcaaatttaatacaatcattaacagaggacatagcacaactcctaaatagcttaattgagacagaatatcataaatattcatcaacaggaaaaattatagagctaataaagaagttatagctttttatttgcgttatgaaatgtataaacttgttgtctttgtctctctattagactggtaaatattcaaaagtatatgttaaatttcagacattaaatacttagaaaaaaggacatatttagatggataaaaattctgatagacttacgttagtgccatatttcccgaatgaaaagcagactcttaaatggtaccaggatcctaaaatctgtaagcaggtagataatattgataccgtttatgatttaactaaattacgtcgaatgtatgaatatttgtcagtgcatgggtggtgctactatattcaatatcaagggaaattgattggtgattgtactttgctaaaagacggtgagatatcaatcgtgatttgcaaagaatatcaaaacttgcatcttggtagaaaatgtgtcgacaaattggtgcagcttgcaagaattcagaaaatgacgcaagtgaaggctcacatatatgactttaatattcaaagcaaaaaaatgtttacaagaatggggtttaaagagcaacaacctgactggtactcttatgatttatagatcaaaaatattcatgttaccaagtaattcatacaaacaatcagttggtgtgatgtcagataagcactcgtattagaaaaatgtaatcatcagtaattaaagactgtagttgaatcaaataattaactcagcgtataaaatgctgagttagacaaaaaaacaacgagcaattctctcgttgttttatggattcattttgatcaaatttttagtttatctttagttgtaaataccaacttgattaatgtgggccaattccagaactggagattgagcgaggtccaaactaacatcacagccagcatggataccattattttcgccattaagccagtgggtattattagttacgtcatagacagtaccattaaatgcaatataagctggacgtccatttttaccattgtaatttgatagagtttctttagtaaattttctcatataagaagctcctttctaataagatcttgatatattaatggtaacactttgtcaccttatagcaagagatacgaaggagtcttatgcttttcttatgaaagatgaccacgccacccagcaatatcccaatctagaaagtcataattaagctttttaccataaattttctcgtaggcagcaactttttgtcggtagtcgagttccatcatcttatgagcgttttcgttggcgtttagagaaacgtcagggaagattggtggtaaaacatggacaatatatttggtctcataaaaattaggatctttcttttcgattttaggtagatccttaatctcgacaaaagtggagactaccggtacattttgtttagccgcaaaataataggcaccacgttgtaatttgcgaggcttgcgataattccaccacatctcctgttctggataaattaaaacccaattatttttagctaaagctgcactgaggtgcttaggaaattcatttccaatatagctaggactctgaactagtggaatagtgccaacataattcattaaatagcggaaaaatcccggtagcattaggttagtatcttcaattacaattgaaagctgatggtgcatcttgttagcgagcagcttcattggtaaagaatcaacctgattgtagtggttagaagttaaaattgcgccaccaataggtaaattatttaggttctctaaacctacaaattcagttgatccagctaatgctctggataaagtaccaaataagagatgtccaatacgattattaagcttacttgaaaaagtgttacgcttattccaataatcattgaccaatttaaggcgctgatctagggacatttggggatcgccgatttctacttttgctgtgaagttacgttcattagcagctttttttatatttttaatcactgcctcacgattatcgccaaaaatcatagtgttactgcctctcgtttcttaacttttgcccaattattaggatcttgctcagttttgtcttccttagcaagcatatgatccaatttttcgcggtctgctgcacgctcgtcatcagtataattattgagttcgttctttaattcatcgaaaaactgcgtttgtttggcactatcccagaagtactgtgcatattggacattagcaaaatgccatggcttaaagaaaagattatagtgaatcagaccaggattagttaaaggttcagtgttttcatttggcatagcatcccagcgaggatttaagtgcaaaattctgccttccccgatttcatttaaatagtcttgatcaggagcaatacaatcaaaatgatacttttctaaaagtgtcataaaatggtcaataaaatgttcagcgcgaaaggccctagcattcatgacgagcatgccagagttaatgtatttcttggggtcaagtgccaggacatttttgatgtattttatcatcttgtctacatattgaattgaggagtcggtgcaagcagcaaataaattatcacccaattcggagttgtatagtttagcaagatcgtcgtttacaattgtgtcgctatcaatatagatcaccttatcatattcgggaaaaagttctggaataaagaggcgataaaaaatcgacatggtaaaaaagtcagcgcgaagaaagttttccttacgattttgaataggttgtacaagttgatcatcaatatggaaaaacttcacatgaacgtttgaactgctaagatcagacaaagctttttgatgctttgatgagagataggaattgtcataaaattacctttcttagattttaactgattccgtttgtttaaccttagcccaggtatttggctctttgacaatcatgtcaacttttttggccatccattctaggttagctcgggccttttgacggtcttcatcagtaaagttgtctaattgctgctttagttcatcgtaatacggcgtagttttagcaacataccagaaataatgaccatattgaacatcagcaaaatgccatggtttgaagaaaagattgtagtgcacgatcttaggatcttgaatttcaggaatgctttcatttggcatagcatcccattctttaggtaggtgataaatcttatcttcgcaaatttcattcatgtaggcttgatcagggtcaacgttatcgaaatgatatttattcattaagtaatagaatttatcaacaaactttttgtctctaaaggccttcatattaaacagaattacaccattattgatgtatttttctgcaggaaaaattccctgacattctttaatgtacttttgtaaaagtggcatgtaacgaattgataagtcgggacatgaagcaaacatgttgtcggcgatatcaatttcatacattttagcaatatcagtacagataatagtatctgcatcaagataaactgccttgtcatattgagggaacaattctggaatgaatagtcggtaaaaaattgacatagtaaagaattgagcacgcaagtagttttccttagtattgtgaattggcttaaccatgtcatcgtcaatatgaaagatttgaacatgaatattatcagttgaaagatcttctaagctctttttgtgctcatcagatatctgttggactaaaagggtaatcgtatagtccttcttggggtcagtatggtcaattaatgatttaattgaaacatatgcatatggcgtataattatcgctaattgtgtaaaaaacaggaatggttttcaaaataagatcctcctaaattatttttttaaattatttcgtaatttgagatattcgttaagcaaatcatcatattcatgtaaatgaagtacactgtgtacgcgatcaacatcccatggcttaactgtttgagtatggaaataaggccaaaacctaaagctagtagtgaaatgttgaattttggtgtttttttgcaaatgatattgctcattataacggcgtggtgctactcgcttggctacagctagcttgtttattgctgattggtcgggcaaaaacatttgcttaacctgcatcatatgccgcacctcggcaaagagatcagtttgcttaattttcttcatattcagcaacaaaacgccagaattaagataatcaaatgcgcgcttggtcttaagattgtggaagaagaagcggccccaataatcaagtacgcccactaattcgattccggtaatatcctcattgtaaaaagttgtaatatcaccgcgaatgacaatgtcatcgtctaaataaagaatgcgatcaggaatctgtggcaattggtctgcaaataaacgcaacatagcatatggcgtgaagcgagtattcatgttagcggttggcggttcctgttcaaataacttggtgcagtcaattaattcaactgtactgttaggattggctttttttactaaagaacgtaaaaaatcagccgcatgttgtgagaaagggtgatatttacgttcatcactgtgtgcctccatcgttaaaatataaagatgcaattcttgagcaccagaatttttgattaaagataaggtggaaatcaaaacgccatcttgagcattttcatctccacaaaaaagaatattcatgataaactcctattttttatttcttttgaatatattgacaatattcataatcgctattttttgcacgctgcttcattacctgccaaatttcatcgtgaagcttattttgagcttccttacggcttaaatttgtatccgggtaaaagggcccatcaatgtaaataacggcactaggccgcttgctaagccactttttatggtaggttttggtcatgacgaaactaggcgcatttaatttaactggaaagtgcatgcttgttgcatcgaacgggcgaatcttcgtgtaatagggccagacatgagcttcagggtagatgagaatctcgccctttttatccttaatcacagtttgaatggctttaattagtttgagcgattgcttcatatttttgccaacaggcagaccgccgtagcgtacaagatatttgccaatgaaggggatgccccagttagcttgattagcaatagcataaaaatttttgattggaaaaattgtgagcgaggtaaagacatcccccatgggtctagtatggttgccataaataaaatagcccccattgacttgcttaagtttttcttgaccaacgacttttacatgatcgaagaagcggaaaaccacccaaccaaaagcgcatgctaagtgacaagcggtagtggaccagattctagctccaagagaattaggtagaataacgtaattatcgggtagactgaaattttgatcgtgactatcgactacatcatcggttgttttttggtaataataaatccgtttcatcttgccctccatgatacttatgtatcctatgataccatggaaaaaagcctaattcctaagacgagaggaatgctgaaagaaaataaaaaagattcgtaatttcatgatcgaaaaatacgaatcctctgtaaaatagcataaaaaaagcaccgccttcttgcagtgcatctttcatattatgggtggccaggggatcgaaccctggacccacggattaagagtccgttgctctgccagctgagctagccacccatatttgttcatcagctcccgccgacatttaaatatattaccagtagttttataatttgacaagctttttttgaaaaaagttgaaaaataatttgaagctagcaaaaagcgcccataatggccgcttttttactaaagtttatcttgaatatgataggctgtgccttgctgatcctgcttcatgtgatctgcatagtaaacagcatagacaccgctttgatcatttttggcaatcacaatttggcgccctgttggacgttctgccttaatgatttgagcactgcggcgtgcttctttaaagtcgtgtgaagatgcgatggcatcccctggattaaaaaatacagcttcgttcattgtaaagccccctcgtacaaattctaattttattttaccaataaagccctttctaaatccaatttaagaaacaaaaaagagataagatcaacatctcaatgtcattaagttaagacattgacaaattgaatctaatctctgtagaaccgaatcattatgatttggttctttttttgcataaaataaaggcgaaaagaacctaccttttcgccctctgattaaattattaaaccttcaaaattattgccagaaagctggtgttaattatgaaagcccttcacagaaatattttagatcgtcttgatcaaattatcaatgatactggaaagcatattcatgattttatcgatgatcctcatgccttcactaggaagcggtttttagatgcagctacagtcattaaaactactattaatatgcaaggaaaagatttgaccagtgagttgtttagagcttttggccaaaaagctattaaaaataacgataaagtagtcagtacttccgcttatgtccaacgcaaaggtcagctttcacccgcatgttttaagcatattctaactgtatttaatcagaatttatttaatatccagttatttgatcataaatatcgtatatttgccattgatgggtctgattttaatcaaatctggaatcctaaatcagagaatatcgttggaaatctcaatcataaaggaaagccatattgccaaattcatgttaatgcactctatgacctgttaaataatacttatcaagactgcatctttcagcctaagtcaaagatggatgaacgtaaagccgccgttcaaatgcttaaaaagctaaattgcggaccatatatagttactatggatcgaggttataccggctttaacatgattgaaaattgtaatcgcctgcctaactgttattatgtcatacgtactaaaacgggatatggcgcatttaaggaagtagctgagttgcctaatcaagagtgtgataaggatatagcttgctgggtgactacctctaattattattatgaaacccataaggctacagaaaacgttcatttggttaaccatcattaccgtcaatatataaaatatcggtctaaaaataccaaagatggcagctgggactttggagagttatgtacaataaaatttcgtgcctgtaaatttagaattaatgatcctaaatcaggcaaagaagaatgggaagttgttctaactaatctaaatagagccgattatcccttaaaaaggatcaaagaaatctaccatttgcgctggggcattgaaacttcattcaaaaagttgaaatatgctttaggtagcgtacagtttcattccaagcaggatagatttattgaaatggagatctatgcccacatgattatgtttaacgcagtcagtcaaattgatgctcaagcatatgtaccacaaaaaaaatgcaagtatcaatatgcgatcaatttcaaacagtcatgttttgtcatccaggctatgtatataatttcttcttcaactgaaatctttaaaaagattcttattcaaattagtcattacacaattccgatcagaccaggacgaaaagacaaaagaaatctcaaacccaaatcagctgtatattatttatatcgtgtagcctaatttctaaacaagatttgggtttatttggcatgaaaaaagagcattcaaatgcgataaatcgcaaatgaatgatcttaaaagtccaagtcgataatttgtcaatgtcttaacttaatgacattgatcaacatcttatctcttacgaaaaatattatgggtggccaggggatcgaaccctggacccacggattaagagtccgttgctctgccagctgagctagccacccatgtcgttgaatcaatcaacagatattattatgctattgttgataagaaaatgcaagctttttttgaaaaaaaacaaaaatttttggctaatgttacaaaattcagtataatgtaagggcaaaggaggcattcccgatgccaaagaagattctcgtcgtcgacgatgaaaagccgatttctgatattatcaaatttaatttaactaaggaaggctttgatgtcgacaccgcctatgatggcgaagaagctgttaaaaaagttgacgaatacgacccggatctaatgattctggatttgatgttgcccaaaaaagatgggttggaagttgcgcgtgaagttcgtcaaacgcatgacatgccaattatcatggtaactgctaaagatactgaaattgataaagtcttaggactggaaatgggtgcagatgactacgtaaccaagccgttttctaaccgggaattagttgcccgtgtgaaggctaacctgcgtcgtcgtgatattgttaaaaaagcagaagctgccagccaagaagagaccgataagaatattaagatcggtaacttggtcattatgccagatgcctatattgtagaaaaaaatggtaagaagattgaacttactcaccgtgaatttgaacttctttactatttagctcaacatatgggacaagttatgactcgtgaacacctgcttcagactgtttggggttatgactacttcggtgatgtgcggactgtagacgtaacggtgcaccgtttaagagaaaagattgaagataatccaatccaacctcaaattttagttacccgtcgtggtgttggctattatgtaaaacagccgagtgaagaataataaagaaagccacagaactgttatggtagtggctttcttttttatattttttagatattgaatgagtagaatgaaaaaattcaaagcaagattaaatagtacatttaattccattaatactaaaattgcaattgtgttcatgctgatgctactggcaacaattgaagttattggagcttattttacccgtcaattagagcaaaatagcattgaaaatttccaatcatcaatccagattcagactatcgtcagcaatcagttagctaatcagttgaccagtgataataaaaatactaatgatcgcttgaatcaaattgttaatgactacaataatgatgcaattagtgaaattattgttgtcgataataaggatacgattcgtgccgtttctaacttaaatgataaaagtaagatcggtcaacggattaacaatactgatgtgaagcaggttatttcaactggacatcaaattaataaagtggtcgatgatcatggcaattacatgattcaaatatcgccgttgactagtggcaatggctctaacaatactgttggtgctgtctatgttaaagctagtatgcaagatgtctttaacaatttgcgccaaatttcattgactttcttgattgcgtcattgatcgcggctttattaggtgcatttttgtcattagttatttcccgggcaattacgcaaccgatcgaagaaatgcagaaacaagcattgcatattgctgatggtgattattcaagtcaggtaaaaatttattccaatgatgaactagggcaattagctaaagcatttaataccctgtccgtacgaattgaacgctcacaagaagagtctgatagtgaacggcggcgactagatagtgttctgtcacacatgagcgatggagttctagccactgatcgtcatggtaacgtcagtgtggttaatcatatggcactaaactttttaaataaaaaagaagacgaggttatcaataagccgattgctgaagtactgggactagaagatacttcgtcacaagatttgatttctagtcaaaaagagatcgttattacccttgatccaggtacgcgggatgaaattattttgcatgctagtttttctttgattaagcgggtaactggctttgtatcagggtcagtttgtgtattacacgatgtaactgagcaacaaaagaatgaagattcacaaagacagtttgtttctaatgtctcacacgaattgagaacacctttaacaagtttgcaggcttatattgaagctcttaatgagggtgcttggaagaatccagagattgctcctaagtttttggaagttacccaacaagaaactagtcggatgattagaatgatcaatgacttgttgagtttgtctagaatggaccgtggcgtttcaaaaatggatctagaatttgttaacttaaacgattttgttaaccatattcttaaccgtttcgatatgattgttaaaacagataaaaataaagaaaagaagaaatacacaattaagcgtgaattaggcagtcaagccttatgggtggaaatcgataccgataagatgatgcaggtaattgataacattatgaacaatgcaattaagtattcacctgatggcggtgtaattactgttagaatgacccaaaaccaaaatcatgttatcttaagtatttctgaccagggcttgggtattccaagaaaagatctgggtaaaatctttgaccgcttttaccgagttgataaggcacgttcccgggcccaaggtggtaccggcttgggcttggccattgctaaagaaattgtggaagctcaccatggtaaaatttgggctgacagtagcgaaggcaaggggtctactttctatatttccttgccatatgaaccgatgacagaggaggatgattgggatgaagtttaaattcaaattcggtgaatttttcttaggcttagctacactgatcgtcattgtcctctcaattgtgctttggatctttattatgactagtgatcagcgctttagtaatattggtcagcaaaatcaaaataatatcactaaagagcaaacgcgtagtcacaattttaagtcattatatgatttatatattccaactacttcatatggttttgctaatggaaatttgtgtcagctatatgattcaaaaaataatttgactttagaatttaccaaagagataaaaaaagccaaggccactaataaaattaagaaaatagttgatactagaactaaatatgaagagtatttaaacaatcccaactatgtgcagttggtttatccagatgaaattactttctccttatttaaccagttgaataatgccgcaaatgataaccgcgagtttaaccgcttctttatctcgcagtcaaatcactggatttatttgggaaatgatcagactaatgaaatttatcaagtaaaaattgctggcgcaaattttgataaactacgtaaatatgcatgtaatgctaagagcaagtatccagttagattagttcgtttaaaggaaggctattcaccgttttacatcaagacaatgaatgctaaagtttatagttacttgactaatcatcaatcgtattcttactttgtttcgcgtttattaggtacatctggcgttactagtaagactaataagaatggtcaaacggtatattctttgaactactatactcgcttaagagtgccagattctaattcaggtgagcataattatctttatactcattatgaaaaaaataagatccccaatactactaaccgcttattagatagcgtttattatgttcaccaattgggtttaaccgagcaagatttacgcttctttgatgcagatggtgctaatgttagttatctaaactatattgaagggattcctgttttcttaaataagcatgatttgcaagtcaagacgaccttttcaacagattcgattaatgtggcctttaatagtgtaaacttccaaattccaattccgtttgatggtcaaactaagcggttaaaaccaacccaagatgttgttgatgaattagtcaatcacggcctaaagcaggaagatattcaacgaattatcgttggttttgctgaagaaaaggattcaagtcaccatagtttgattaacttgatcccaacgtactatatcaaagcctacgatgaatggaagagcctaggtgaatgggaaaagcaagacgtatctacctaccgtgaagctgatcagttaactgttaacgaagggggaaaatagaaatggaccataaacgaatcgaatggctatttttcgttgttttctttttaattgatatttatcttggaatcgaaattctccgttctcccgttaatttaagtaacgctgataccactactcgtagtgttgctagcatccgcaatgaaatgaagtcagacaatattgatttgcccgataagatttcggatgcaccagattctggttattatttagctaccaagaatcgtgactatctctctggcaaagttagctcgctgactaatgtaaatgcccgctattctaaaagcgataatgtgctttatggtgaaccaagacaagcagtccttttgagtaaaaaacctaaggaagctttagaacaaattgaagattttaagaatgattcgaaaaatattccttatggtaaagaattcaagtatgaacctgatatgtcgagtgaagacaattatgtttttgtgcaaaactcagattatggtgaaatttatgctaactcggcccaattgaatatcaatgtaaaagataatcagattattaattttactgaaacatatatggggcaagctagtccagtgcgtgaattacagtcaaccatcagtgcttggcgtgctgtgcgtgcgatgtacactgatcgtgagttgactaataattcgcgcgtaacgcaggtaaaattaggttactccaaactgacagaagtacgtggcagcacaatcttgttgccaacttggctggtttgggtagaaaataagacaactaaaaatatcacgatgaaacgtattaatgcatatacggcacagatgctacaatcgagtacctataatgtagaaaagtagaagggacaaaaattgaaggtttccgttttagcaagcggctcgaccggcaataccagtttaatcgttacaggccagcataaaatcctgatggatgctggcatttctggtaagaaaactaaagatttgctagccgaagttggagttgatattaacgagattgatatggcctttttaagtcatgatcataccgatcatagtggcggactcggcgtgttgatgcgccgttatcctaagatagatgcttttgccaatagtgggacttggcagtatttattggatacgaaaaaaataggtaaattaccggctgaacaaatgaatacaattgaaccaggccaaactaaaacttttggtgatgttgatattactgcctttgcaactagtcatgacgcagctgagccgcaatattatgtgtttactagtggtggtaagcgggtcgcttttttaactgatacaggttatgtatcagaagaagttgaagggacaattgaagatgctgatgcctatatgatggaatttaattatgataatatgatgctcagagatggaccatattcctgggcactgaagcagcgaattttgtcggatgtaggccatttatctaatgacgaagcagcccaggcattagttgatgtagtcacacctaaaacaaagcatatctttttagcgcatcgcagccaacataataatacggagtatttagctcacgaaacggcaaaggaaatgctgcttgagggggatgcgaatttggatgatgatgttaagattattgatacagaacctaatcagcctacaaaattagttgaaatttagcagttttcacaacattttttcatataatattcaaatttaatcggtatgattagtaaacaagatgaggggagaagcaagcatggtagaaaatcaaaataataataacaatttacaacaacctagaaaaaagaatactaatggtaaaatcattgccactgcagcgattgtcggtgtagttggtggcttgatcggtggaggcgtttcatattacgcagctgatcaaatgaataatgcatcagttaataatggtgccgctcaaactagtgtatcttcaagtagtagtaaagtttcagaaaagagtgctaagactagtggcacaatgactactgcatataatgatgtaaaaggagcggttgtttcagttattaacttaaaacgccaatcaagttctaatagtactaattcactttataatagtttattcggtaatgatgacagtgatgatagctattcatcaagcagcaagggcaagcttgagacttacagtgaaggctcaggtgtagtctacatgaaatctaatggcaagggctatatcgttactaacaaccacgttatctcaggcagtgatgctgttcaggtaatgctagctaatggcaagacagtaaatgctaaagttgttggtaaggatagtacaactgacttagctgtgctttcaattgatgctaagtatgtgactaagacggccgaatttggcgattctaagagcttacaagctggtcaaactgtcattgccgttggttcaccattaggtagtgaatatgcttctacggtaacgcaagggattatttcagcaccggctagaaccatttctacttcatcaggcaatcaacaaacggttattcaaactgatgccgcaattaacccaggtaactcaggtggtgccttggttaactcagctggtcaagtgatcgggattaactcaatgaagttagcccaatcaagtgatggtacttctgtcgaaggaatgggctttgcaattccatcaaacgaagtagttacgattgtgaacgaattagttaagaagggtaagattacccgtccacaacttggcgtaagggtaatcgcacttcaaggtattccagaaggctacagaagccgcttgaagataaattctactttgaagagtggtatttacattgcctcagtaaacaagaatagttcagctgctaatgccggaatgaagagcggcgacgttattaccaaggttgacggcaagaagattgatgatgtggcatcgttacacagcattttatacagccataaagtcggtgataccgtaaatgttaccgtgaacagaaatggtaaggatgtcaacttaaaggtaaaacttgagggtaactaaaaatcaaaatagaagttaattaaaagaaaaaaggctatatcacgcggtttaaacgtagatatagcctttttgttaactttttaaatgtgtaacatcaaattgttcggaattatttgttgtcaaacagacactagcctgttgataagtgtggataactctgtggattgtgtataacttgataaatataggtttattaacttgtggaaaaatatgatgattttgaccttatttagtgaattctatttgagaaaacaggcgttcatgcaggcataacaagccttaagagataaagtttgtgaaaaaaggctttcataaaatcgatgtgaataaagaaattttagaaaaattattaaatacaacttctggggtataagtaaaataataccacaaaatgttgaaattggtctttgaagttttgtggaaaagtttgggtaaatagtgtggaagggatgttagtattgtgctggtagattaaaattatgaatggaaaattagctatgcttgttataatagaagcatgaatatcaaaattgtatgtgttggaaaattaaaagagaagtattttagggatgcaattgcggagtatgagaaacgactcagtcgttttgcaaaggtgtccattgtacaggtgcctgatgaaaaagcaccggaaaaattcagtgcagctgaagatgagaaggttaaagagattgaaggtcagcgaatcctgagcaaaattaaagataaggagtacgtgtatgtgactgcaattaaaggaaagcagcgcagcagcgaagagttcgctaaagagattcaggatctcgcaacttatggtcattcagacattacgtttgtcattggtggcagtttagggactagcgatgctgtaaacaagaggggaaatgacttgattagttttggtaaattgacgatgccacaccagttgatgcgcgtggtgttgattgaacaaatctatcgtgcatttatgattaactcaggtagtccttatcataagtagaatatagaaaaagcccataaattgggctttttatttttgcatatttgcagatttcacaagcatattgaaaaaaactgtggcaggtcagtgcttttttagttttttatgatttaaaaatagattttgttaaattatgtttggcaacaaaaaagacgatctttcgatcgccctgataatttttgagctaccagctagtagctcacgcacacgctgaagtgtactttatctttgtagtatctcaattttaacacataaatggtaaaattaaaactgcacgctgaagggggtaagtgtcaatgtttttgcggtagcctttaaaccattagtctaaccttaatttcttaaatatttatatgacttaaatttctgcttagcttgcttaaataactattgccagctacctgtgcggttaatgcgccatgctggatgcctaaatgaacttcatgacgcttctttaagctgtcacgggccgctgcttttaattcctgttcagtcaatacagttatttctgaatcttcaaactcgctgctaagccaaaattccagctctcgattcttgatgcagcttaagatcctaagcatgccttctgctccagattttgaccatttcttgccttgccccttaacacggtaggtatacttgcggtggttgctctcgcagcagccaatggctttagtcacagtcagttttcgtttcttaaacggcttaatatcgtcccaatgacgatcaatataattccttaggcgccccagataatcatgattgagctcggtattcaattcatcaattagtcggctttctgcagtggttaggatagttttaactttgtcatagctgtatttgtattccaaagcagaaatcagcttgccttgcaggtcaggcgcaaaatatagcctttctttgattttcttatttaggtgaaagacatccaagaaatgctcatgacgcttgcatagccctacaatgtcatcgaagtctgttttggcatatccagcaccgccatcggcgttgctaagaattacagtatcagaaagatcataagtattggccaggtactccttggcttcgttcagcgcatcaagtcggcttaaagaaacaaattccttggcattgattcgctttctgcgtttcttgcttatattgacaatgccttcacagacctgatagcgatgaaattccaaccggcttttagtgcctttgatcaccacgccatcgccttcaagatacaaaactgggacctttttcttagtgcctgcggcatcatatcttgaatctgcttcttggcccgctttaatatttttcccggccatttttaccaaattgcccacctgcatatggctaatattaaagccagacaggcaattgactgctagagcagtattgcgataagtggcaacgctgcttacttctaagatgtttttgactgctaaaatactgtagcgcttgtatttgtcaaagcccattaattcatccaagggataccttgcttgtttgcctgggcagacatatcttcttctgacatacctaacttcgccaaaagccatattgattgagcgctcattcttcttatcaatctgatagccctgtgctttaaccttggtaatcatttcatcatcaactttagctaaagccaaggccatgatttccttaatcaggtttaagaagaaacagattatttttctttcacgcttaatataattatcttcagactttataatatttgcgatttcagttacaattgaattcataaaagaccagcttctaatgtgttttttgttcttaacatcagactactggtctttttgtttgagctcaagtccaaattcaaaggacttgggcttttttaattatttattcaacttaccgtaaaaaattatacacttagctgaaggggtagcgcccttactcgtgtggaaggaggtagactcaatacagccgtccttcggggcggctttttttatgatgaaaatggcaagtcatttggtgaaaagtattacgcatatcgtgcagtaactgtaaatcaaagtcccataacaattaatggcgctaaattctacaagttggctgatagggatgcttatattaaggtgaccaatattagtggtcaaggtcgcgttttaaagcgtaacgcctacatctacagtacatcaaaaaaaacgcactacgcataacggtgcttggaagttgtacaaaggctccacagtgacaacttacggtggttcatacaagtttaagaatggcaaacgctattacagaattggcggacctgctaagcaatatgtaagaacatcaaactttaattagaagttgaatatcatttacgacagcaacataatagttgctgtttttttgcctcaaaaaccatagaaaatcttctgtaatcaaggtaaaatgaaattgattttacaaatatcatggaggatgttggaatgagaaaacgatggacagcagctgttattgctgctttagttgccgtaagtactgccgcaactactgttaaggctgacgatactaacacaacagctaatactaatgagacgcaagtaactgcaactagtgaccaaactaattctgattcagataaggttacttataacaaggcagattatttgtctgctaaccctaaattagtgcgaattaagcatgcaactactgcttataaggatgctgcattgactaaatcagcacagagcgtaaaagcaggatcacactttttaattagtcgaattgttaaatctgacaaccaagtaccaatactaaagactagtgatggcttgtatttgcctgctaaaaaatctttggtaactaaggtcatagcctaccaaaatcctaagggttatcatcaagtacattacacacaagttaaaccatacggtaaggtgggttataacttgtaccgtggctatgagggtattaagacttggaaagtaatgcatagagttggtacttgggcaggtacgaattactataaccaagctacttataacgcagtaaagaacttccaacgtagtcaccacttgccagcaactggtaatgttaacttagctacttgggaaaagatgggcttttctaagaagtcatggtatagcattgatagttatgttgccccacttaaggcttatgcttggcaagggcgtaaagctcatattgaagcaatgattaatcaagcttacaaatatatgggaaaaccatggttagcaggttgttcaactagtccaagctacggtgttgattgttctggtttggtaatgcaaggtctttatgcaggtggcattagtccagttccaactagttcaatcggccacgctcatccaggcaatgaatggaattcacgtaatctttgggctgacaagcacctaaagcgtgttccatattcacaaagacaatgtggagacttagtgttctattaccaaccaggtacgcacactatttggcatgttgcgatttacttaggcaataaccgggtaattgaaagctggccaccacgtgtgatggttcaaccaattgttaattcacaaagaaatgtaattgctggtattaagcgaccatttatttaaggaaaaatatgaaaaaatacttagctattttattagtcagcctgggctttagttcattattgttaactcgccaaacagtacatgccgctgataatgatgatgccgcgacaactaatcaatcggctcctaagtatactggccttaaaaaagttggtaaacattatgtctattttgatcaagcaggcaagcaacgttttaaaaataccaagactaaaaaagcatattattggattaataaaagcggcaagatagttggtattaataactacgccaaggtaattagccaactacctgaaatgccaactggttgtgaaattactgccgtgacaatgatgattaattttgctggtaaaaaggtaactaaacagcaggcggccaagattatgccgcgcagctctaaccctaacaagggctttatcggttcgccttacaagaaatatccgctcggctattgggttgctcctaatggggtgaaaccagtagtgaagcattatcttggtagagcacagaatatgattaattgtggtttgcccgcaattaaggataagctgattaattcacacttggtggttgtttgggtagggatgtttgacggcctctctaaccatgctattaccttgacgggttaccatggtaaaacgatctattataatgatccttggactggaaccaagcggaaaatcaagcaggaaatttttgcaacgcattgggctttagatgctcatcgggcgttgagttattaattttatgtaaatatatttactttttagtcatgttgatcaagccactttcgcagcatttcaacatattcatctgttttttctacaaaagacatgtgaccgcagttttcaaatagctgccatttactgccagcaagctgatcctgcatcgttttagctacataaggtgtacataaatcatcagtcccactcgtaattagagttgggatttttattttgcctagtttttctgtgtattcgtaatcgtgcaagttgccctctggcgtatattcatttggtccccaggcggtttcataagctacaataccaccacatttttttcgcataacgcattcaggccacgttttcgtcatgtcaattgcatgttgattcatgaagtgctcattagcttttaagtaatcaggatcgttaaaattgctagtcaattcggcgcgatgaattgccgcctgttcttcaattggcaagtatttaatcatccggtgtaattctttgctccataaggaagcagacgacaaggttgaagacaagatcaagctttgaatgccaacaggatgataatcacacatgtagattagcgctagcatcccaccccaactttgtcctaataaatgtattttgcgcaaagccaagtgctcccgcaacgccatgagttccttaacccatgtttctttagtataaagttcagggtgatcatcagggatgctactcttgccgcagcctaactggtcgtacatgataatccgtcggttatcaatttcggctaatttgtccaaaacctcaaaataattatgacttgagccgggaccaccatgtagcaatacgagtggtgtcttttcgcttcttcgaccaacaatacgatagtaagtttcatagcccatgaaaggcatttttccttcgataatttccattttttcacctatttgaacaaaaacaatgagatattaaccaaaattagcagggtaaagaagattacccaatctctagctggtaaaggaatagcgatgatcgtcgaccttctttgcccttcgacatagccatgtgattccattccttgggccagattgtcagctgaatttaaagcaacaagaattgctttaaaatagaggaccggcgaccaaaaactgagataaatgccccgcatcatagcgctagttcggatctgtttaaccgccatcttcatctgcggaataatgttaatcgccgccagcacgccgtaggcaaatttactgggtaagtgcaggttctgctctaatgatcgggcaaagtctgtagcggtgttattacgtgtcacgcaggcaatcgtcaaggtataaacatagatacgcgttgacaaattccaagcataataagcatttggtgttggtgaaaaccaaaagagcgttgcaaagattgtaaaagcagcaataaagggcaagataatgagcaagattaactctttgattttgaatcgagtaataattaaataaactagcgcgaaggtgattactaacaaattagtaactaagctagcttttaaagatatttccagggaaataataaatgctaaaagaaattttaaactaggattcataagcttatctttctacatattttaagcgctgatccgcaaaaatcaggtggtaatcgcaaaattcagctagctcgtctatctgatggctaatgataaaaaacgtctggtggagcttttgctggctttctcgcattaattctaaaacgagtttgaccgagttatggtcaagtccactgagcggttcatcaattaataaaacctgatgcttagtcattagcattaatagaatctgtaatttcttctgttggccacctgagagagaataaacaacttggtctaagtgtttggctaaacccaatttatctagccattcattgaccttttcttcagtaaaaaataaatttctatcctttttacttaattctagttcatctttgacagtcacagctaaaaattggtcgcttgctttttgaaaaatttgagctacttgtgttaaatattttctagctgagatttgagcgatttccttatttaaataagcaaaattaccagtatacggaatcattttggtcattactttaaataaagacgtcttgccaacaccattagcaccagtaattagggtagtgccagaatgcaaatttagctcattttgcttaagcaaaagcttgttttgtctaatttggacttgttttaaagtgaaaataggctcactattaggtaagacaaaatgataatgtcgctcatgcaattttttattttgttcaaataaggctatttttttgctagcatttaattcaataacttcttgattatttgtaaactcaaaaagatggtcgcagacaggttcataatcgtctaaaacgtggtcacttaaaataatagtttttccgttgtgagctaaaatcgctaattttttaatcaaaaaagcacgtgtcttaggatcacaactggcaaacggttcatctaagagcaataaatctacatccatagctattaagacagctaaagcaactctttgttgctgaccgcctgatagagtattaatcttttgatcgagaaggtctgcaatttgggtgaaagctgttgcctgatctagtcgtgtttgatactcaccttcatctaactgtaaattttctaaagcaaagacaatttcttcacgtggagttggcattgtaaactgttcagccgcattttggaacatcattgccgccttttgtccgtgcaggtccaccatacctgttagtcgccctgcatatttgggatacaaaccagcgataattttgagtaaggtagatttaccgcagccggtcggtccaattaacagagaaaaaccatggggaatttcaatatttagatgattgataataggttctttttcataagaaaaagtaagattgttaacggttactttcataagcttgattgtacaagatgctttggggactgtctacaggtagagtttgttataagtagaacaaatcataaataatacttaatactaaataaagttttgatttataatgtaattatagtgttaccatattttatttaatttaaggaaggtggacatatggcagctgttgctttggaccaatatctggcaagtgtattaaagtcaaattcaacagataagaatgaaataaagttggaagctggtaatccagattttgatctgtttactatctaccttgaaaatcataatactggtatttatcgctatcggatggatgtttcaacgattttatatattgctaagggtactgtgacaattaagagtggtgaaaagatcattcaaatgaagtctgggaatgttttgctactgactgaaggttgcaagtatgagattttaagtcaaaaacctgatacggtactgataaagttgaagtttaagcgtggatttctatatcgcaagtattttaaagattttagctgtaagggagaacgtgaggttaaagttattgagcaaatcgttgatagcttagaaaatgaacatgttctttggctaaaaaataatcaaattactcgtgcttctcaagtgatgcaacatattattggcggttatttgaataatgatttgtttactaaagctttaattcaggctgagttgaccactatgttgattatttcaattagaactcagcgcatggcaacaccgactagtttggataaaactaagtttgaaaagaagaccttagataattacatcgatcttcattttgccgatgtctctttatctgacgctgcaaaatactttggcttcaatcctaattatttctctaatatggttaaggctaagactggcaagagttttgtggatcacgtggatgatcgaagaatgcaagaagcgcgtgaattgctggctcagcctgatatttcacttagagagattattggtcgagtcggatattcgagtaagtctttcttttataagaaatttaatcaatactaccacataacaccagcagcgatgcgggcagaattgtttagacaagcaaatatcaatttaaagtaaaaaaataatctggacgaaagttccagattattttttacatattttctaagcgtttaatgcggtctgctgttggtgggtgagtatcaaacaagtgcgtcaaaccgtgattgtggaatggattttcaatatataatccagcactactactatcagctactttcattggttggctattttcaatcttgcgtaaggcagaaattaagccttgcggattacgtgttaatttaactgaagatgcatcagctaggtattcacggttacgcgataaagccatttgggctagggatgcagaaagtgggcctaagatcaacacaaagaccaaggcaaccactttaaaaattatggctaaagcattactgtcacggtcatcgtcgtcatcactgcgcacgccgccccagaaccaaaaattggacgccatattagagataaaagaaatgaccccaactaataccacggcaattgttgaaagtaaaatatcgtagtttttcacgtgtgataattcatgccctaagacgccttcgagttcttcacgatcaagtaattctaaaattccttgagtaactgccaccgcactatgttcagggtcccgaccagttgcaaaagcattgggactaggatcaggaataatatagacccgtggcattggaacctgtgccaccatcgccatatcttctacgatatgccacagttccggattgtcggcttcatgaatttcttgcgcgtgattcaagctcataatcatgttggctggattttgccacatgatgaataagtagactaaactaccgatcaaagcaatagtaacgcccattgttggactattgctccaaagataaccgattcccgcaccaactaagcctaagatcaccaaaaagatgaacataattaacgccgttttgcgtttattacgagcaatttgttggtaaagcatggttaaacttccttaaaattaaaacttaacttgaggcacattcttttcttcactaggagtttctaagtagttaatcttagtaaagtggtgccacttggcaacaatatttgatgggaaagtaagcaacttttgatcatatgttgctacagttgaattataaagttgacgagagtaagcgatcttgttttcagtgttagtcaattcttcttgcaattttaagaagttttgattagctttcaagtctgggtaggcttcagccaaagcaaaaattgacttcagagaatcagtaatttggttagaaagcttcatcgcttcttcatggttaccttgaggcacattaaccaattgattacgtaatttgactacttcctcaaaagttgatttttcatgcttggcatagcctttggtggtttcaaccaagttgggaattaagtcattccggcgcttaagttgaacgtcaatttgactccaagcttcttcagcatagactttcgctctttgtaaaccgttgtaagttactatgtagatagccacgattaaaacaataatagctaaaatgatccaaattaaaggtgacatagtttttcctccataaaatatttatttaattttatcgttttcgaatttcttgagcaataaaaaagaatgtcaaagcggcattcttaacaaaaaatattaaattctgaagattaatagtaataatccaactgcagttaaaataatcaaaccagcaaattgcataatagtccattgaataaaaaactttttcttacttacgctaccgtgttggttgaaagtcttaagaactaacatattagccattgaaccgatagcggaaccaaaaccaccaatgtttgaacccaagaataatgcttgagcataagtggtaaatttaccaactaaaatggttgatggtacattgctcattacctgactagagataattgaagcaaagtaagttgaaatttcagaataaacggtgccatgaattagatttacgataagagggatttgttggatatcgctgatgaagatgaagaagccggtaaaggtaagaagtaaggcatagtcgattttgagcataatcctaggattaattgcaagggctaatgcaaccgacgttagcatttgccaaataatatcaatggttctgaaaacaccaaagaagaagaaaataaagacagcagtagttatcagcgtcgggcgccagctgatcttgattggctcagctttttgcaccggaatttcttctttaggaataaacagaaagactaatcccatgattagcattgaaactactagataaggtacagaccattcgaaaaattttaatgggctgacatcaaagcggctgactgagaaaatattgtgggggttgccccaaggcgtaaatgctgccccaatatttgcgcccatcccaatcaaggtaacaggcaaaatctgtggcaatttataacgcttagcaatatttaaatacagtgggatcaaggtcaatgcagtaatgtcattacctaaaaacatccccgaaatgacagccaacaacgaaaacagcgtgttcaacttacgcgtattatcggcaatacttgtaagcttgtacgctaaaacatccagaacatgcaagtatgcatagatctggataatcgttaacatcgcggcaacagaccataatgtatggaagttaatgtccgcaaaccgcggtctggcaaaaaaaagactgactactgtaatgatcacagtaatctgtaaaattctatctttagcaatattctttaagacggtcataaaaggtcccccttacgtattacaatcgtctaaaaaccctatgtaccattttgagcctttttgttattgcatgcaatgataaatttaaaaaaatatcaagattagcggtatttttgagcatatttttagttagttggaactagtcgtgctatacttaaataagtaagttaataaaatttagattgaaacgaggaaacaaaatgacagagaatgcaatttcaatcaatattaaaccagatgctgcagaaatgattaaaagcaagatggatgcagatcaccaaattgttatcttggctttagatgatggttcaaccaagtattctaaaaaaggcggcacttgtactattggcgacagcttccagtttgtaatccttgctgaaaaagatcctaagtataatatttcaatcgaaaataatgctggtcttgacttgtatactgctcagccggaaacaactttctttgaaccaggtctagtggtaaatgcacgcaactcaactttgagtttatcttcagacagcggcattattgatggtgggatgaccgttacccaatatgaacctgaagcaattactgctgatgatctaaaaaacggcggtcaatgttaaaaaaataaaattaatcatagggacgagggaatgacctcgtccttttttagtatagaattaagaaagtgatttcaatgtaaggggggaagaacaatgacttttgtcaaagaaataaaagcaggtagtcgtgaattttgccaaaattggctgcggtatctgctactttttatgggattaagtttatttaatcaatttattgttattccactttttcgctatattacaacctttgttttgcaggctagtgctattccgttcgtatcttatcgaaatgtagtgacgatcattacgacgcatacggttgcctttttaattttgataattgagttgctgcttttattagtaatcttgtatgcgcaattagcttatttacttcatggcgtttgggatattaagcatcaagtttttacgtggaaaaatagttttattcaaacttggcaaaatatcaaaaaaattcgtttgggcacgctttttattttgatgctctattttttattggtagtaccgttagccgatgtcatctttagaacaccacttttaagcaaagtgcagatttcagaatttatcttggattatctgacgagaacgccaatcttgttagccgttttgattgcgttttatttagccgctttgatccttggtgcaaggctagtatttgctttacccatcatcgtttttgaccacttaaagtcagtgcaagcagtaaaaagaagttggcgattaacggcgcactaccgttggcggacgatttgctggaggattattgttttagccgttttatctgcagcagtcatgacaattttctatttagcaatgtattgcctgcagctattagttgatttattacctgggaaatgtccgttaattttagccattagcaatctttcgcttgttcaaattattagtgaagtagcgttagtctatgttagtgtactgggcttatctattattttgaaagctttaaggcaagaaaagataagtcaaacaggtaaaactaaaaagataattctaagtacattagttgtgtttgtactagtaatgattaatgcaatatctaccaattatttatatttgactagtgtaaatgctaaagcgccagtaattatttctcatcgcggcgttgatgataaaaatggcgtacaaaacacgttacagtcattaagaaaaacggctaaagaaaagccaaactacgttgaaattgatgttcatgaaactaaggataaaaaatttatcgtaattcatgatgagaatttattgaagctaacgggagttaataaagccccgaatgatttaactttacggcaattagaaaagttaactgccaaagaagacggctatcatgctaagttagttagctttgatcaatatcttgaggaagccaaaagactgcatcaaaaattgctaattgaaattaaaacgacggctaaagattcgaagaaaatgctgcagcgctttaatcaaaaatatggcaaaacgattcttaaaaatgcgtatcaagtacaatcactcgactatcgcgtggttgaaggactgcacttaattaatccacgtttggttgtcttttacattcaaccttataattttacttatccgcaaagtgttgctagtggatattcaatggaatattctaccttgaattcagactttatttggcaagcccatttgcaggatcgtcctgtttatgcctggacagttaatgacgaaaaattaatgaagaagatgatgtatcaacaagttgatggcttaattactgatcgagttgatttagctaaaaaggcaattaaaagtttccaaaaggatgctagttatgctacgcgaatcttaaattatattgttgtcctgcatctgtcgaaaaattttgaatctgcatgaagacttgatctgaagggctggacatggtaaactatactagattttcgaaaatctgaaaggaagtatagcatatgcgtaaaggtgaaaattacaacactggttgtgaaccaaatcaaagacctaagaacaagagaaacgcaaagaagcgtgttgctcacgtagcagcagttgttgctttcttgaacaaggccgcaaaagacgaaaacaagtagtctttaataatattgaaataaaagctaggagctgacgcttctagctttttttgtgcttactgaaaaaattaattctaagtgtataattttttacggtaagttgaataaataattaaaaaagcccaagtcctttgaatttggacttgagctcaaacaaaaagaccagtagtctgatgttaagaacaaaaaacacattagaagctggtcttttatgaattcaattgtaactgaaatcgcaaatattataaagtctgaagataattatattaagcgtgaaagaaaaataatctgtttcttcttaaacctgattaaggaaatcatggccttggctttagctaaagttgatgatgaaatgattaccaaggttaaagcacagcaagctcttagttaaaatcacgccacttaagcgttacccaaaagttacgttagttgtaccagctcataatgaagaattagttattagtaaaactacgcaggcaattttaaatttgaattatccggctgataagttacaaattttaatctatgctgataattgtactgatgatactgctaaaattgcccgggaaataatcaagcaatatcctgaacggaaaatcaatgttcaagtaattgaacgaacaggtagtggtggcaaagctggtgtattaaatgatgctttgaagattgcccaaggagaataccttggtgtatatgatgcagatgccatgccagaagaaaatgctttgtattttttaattaaaaagattttggaaaatccggtgagatataaggctacttttggtcgcaataagacgagaaatgcgcggcagaattttttaactaagtgtatcaatcaggaaattgttgttacccagcgaattcaacactgcggtatctggcaattatttaagattggtcgtattccagggactaactttattattaatactgattatgtcagatcaattggcggctggcgcaatggcgctttgaccaaagatactgatatttcttttaaaattatgggctcaggtagtttgattgccttagcctataattctgaagccttccagcaagaaccagaacgcttaaaagattattatttccagcgcttgcgttgggctaaaggtaactatgaagtggtgatcaataatttttgccatctttttgataaaagcaactggcgggttaaattagagactgtctattattcctgcacttttttctggtttaatttggcgattgttttatcagatctgatctttttttctaatttgattgccttaatcgtccatctttggaatcctgcagtagtaataccatttacaatttcgcggagtaatattttattagctcaaattctgctctttaattggctattgatggttttgctttatattttgcaaattaacctagcgatgactacgcaatatgggcaggcaactgacgaacagatttggctagccttagcatcatattttacttattcgcaattgttcatcattgtatcaattcatgcggttacttcagtaatgctagatcgcgtttttcatcgtgatagtactaaatgggttaagactaagagatttgcggattaggtgatgagatgaaaaaaagatggatgctactaggatttttactcgtaacgattgcatttaccggtattatgatctatatcagagcagataataattcagcggtgcgtaatttttttctacattcttggcataaaaattatgtagttgaagaaaagaatcttgcctatattaataccacgcctaagcaggaacaagtgacggttttatctgaaggccaaggatatgggatgtttattgcggcgcatgatccagcagttaaagaaagcaactttgctaagctagtgcagtattatttaaaacaccgggatcgtaatacgcaattgatggcttggcggcaaacaaagaaaaatggaaaatggagcagtgaacgcaatagcgctactgatggggacttatttattgctaaagctttgtttttagcggctaaaagatggaaaaccccagcatatcagcggcaagggcaaaaattaattgccgatattttgcgttatgaatataatccgacaacgcacgctttaacggtgggcaattgggccgattctaagtcgaagtattataatttaatgcggacttcagatgtattgccgacaatgtttgatcaattttatcgtgaaagcaatgattcgcggtggctcttaattaaaaaaacaatgctcaagcggctcaatcagttgagtcaccagcataagagtggcctagttccagactttgcctggctgacatcaaaagatgctaagccagttaaaggaagggttaccactgatcgatatgatggtgattattatgccaatgcttgccgggtgccaatggatttagcatttagtaaggataaattagcaaagaatactgtacatcgcttgcttaaattttttagcaagcaaaatacaattacagcaggctatactttaaaaggcaagccggtcaataattatcaatcagctagctttagcgcgccaatttatattgcggtgaatgaaaatcgcaatcaaggctatgataatttgtttgcttcgcagcaatatatttttgctaaaaaattacctaaaaataattactatgatgcagcactaacgacgatggcaacgatactgacaccggcgcatagattttaagaggcaaaggcctctttttatttgcattgaaaatcaatctttgataacatagtaaaaattttaaggaaaatgaggaggacaaaaaatgggattaaatgcatacattcaaggttttaacagtttagagtcaattgatcgagcaccgggctacttcaagtatcatcaccactcagtagctgaccactgcttcagaacagcggaattagcacaaatgatgggagatattgaagaggtaaagggcaaaaagaagatcaactggaaggctttatatgaaaagagcttgaatcacgattatactgaacgtttcatcggtgatattaagacacctgttaaatacgctactcctcaacttagaaagatgattggtgacgttgaagaaacaatgaccactaagttcattaaggatgagattccagaagaatttcaagaaatttatactaaacgtctctcagaaggcaaagatgatactttagagggtaaaattttatcaatctgtgataaattagatttgttatatgaagcttatggagaaatcgaattaggtaatcctaacccggtttatatgcaaatgttcaaggaaagtcttgaaacgatcaagaagttcgacgatttagtttgcgtacaatactttattaagaaaattttgccagatctttttaaaggtgatttcgcgggaaaggataagatgcaacgaatagcttttagcattctattgttaggggatgattaggtgaaatttcaatgtagttcatgcgggctgcgcatggactctttgcattttaagcaagaggggttaatgaatcctaagttgaccagtatttgcgacatttgtatcacgcgcaacctgaatccagaagattacgcaaatgatgcggtcgcagcttttgctcaaagcttgctttacacgtttgtcggtgcaaagaaacaagatcaatcaggttttattgtgaaaaataaaaaggaccgtaaaaaatacgaggcctttttacaagattatgatggcaatgaaatcgcccgccaacagattaaaaggtctgatttgaatttggcggtaattaaaagcgaagatggcaagcttaattatgtgcctaaccaaggcgtaacttttgagcaaaatttaaagggaatgggtttggagatcaatttccagttaaacgaagttgattttattgatcgtgaacgcattcgggccaagtataaataccgctgccaatattgcggcagacgtggccacagcgtagatcataaggatcccgtttctcttagtcacaacaacagcttagataatttaactttagcttgtgcggaatgcaaccgaattaagtcggatatgccttataagttgtttattcaactgaatgatcaaatttctgagatcaataaaaagctagttaagtatgaagatgcgctgggtactttgagagaagaatttgagcatcgtcggcgctatttagcggctcaagtacaccttaagggtgttatcaatgatcctgagctaaatgcgattagaaagcaaaataagagcttacaggatgacattgatagtttacaaagtgattatgatgatttgcgtcaaacgcgcaagacgtattttgatacgggctggaaattagctcgcattaaggaaaataaggatattatttaaaacgtaaaaaagcgctattttttgtaaactcaattcaaaataaaaaatgagttttaaaaagatcatccccatataggcaatgtcattaagttaagacattgacaaattgaatctaatctctgtagaaccgaatcattatgatttggttctttttttgcataaaataaaggcgaaaagaacctaccttttcgccctctgattaaattattaaaccttcaaaattattgccagaaagctggtgttaattatgaaagcccttcacagaaatattttagatcgtcttgatcaaattatcaatgatactggaaagcatattcatgattttatcgatgatcctcatgccttcactaggaagcggtttttagatgcagctacagtcattaaaactactattaatatgcaaggaaaagatttgaccagtgagttgtttagagcttttggccaaaaagctattaaaaataacgataaagtagtcagtacttccgcttatgtccaacgcaaaggtcagctttcacccgcatgttttaagcatattctaactgtatttaatcagaatttatttaatatccagttatttgatcataaatatcgtatatttgccattgatgggtctgattttaatcaaatctggaatcctaaatcagagaatatcgttggaaatctcaatcataaaggaaagccatattgccaaattcatgttaatgcactctatgacctgttaaataatacttatcaagactgcatctttcagcctaagtcaaagatggatgaacgtaaagccgccgttcaaatgcttaaaaagctaaattgcggaccatatatagttactatggatcgaggttataccggctttaacatgattgaaaattgtaatcgcctgcctaactgttattatgtcatacgtactaaaacgggatatggcgcatttaaggaagtagctgagttgcctaatcaagagtgtgataaggatatagcttgctgggtgactacctctaattattattatgaaacccataaggctacagaaaacgttcatttggttaaccatcattaccgtcaatatataaaatatcggtctaaaaataccaaagatggcagctgggactttggagagttatgtacaataaaatttcgtgcctgtaaatttagaattaatgatcctaaatcaggcaaagaagaatgggaagttgttctaactaatctaaatagagccgattatcccttaaaaaggatcaaagaaatctaccatttgcgctggggcattgaaacttcattcaaaaagttgaaatatgctttaggtagcgtacagtttcattccaagcaggatagatttattgaaatggagatctatgcccacatgattatgtttaacgcagtcagtcaaattgatgctcaagcatatgtaccacaaaaaaaatgcaagtatcaatatgcgatcaatttcaaacagtcatgttttgtcatccaggctatgtatataatttcttcttcaactgaaatctttaaaaagattcttattcaaattagtcattacacaattccgatcagaccaggacgaaaagacaaaagaaatctcaaacccaaatcagctgtatattatttatatcgtgtagcctaatttctaaacaagatttgggtttatttggcatgaaaaaagagcattcaaatgcgataaatcgcaaatgaatgatcttaaaagtccaagtcgataatttgtcaatgtcttaacttaatgacattgcccatataggaatgatctttttaatttttatctatctaattcgatcttctggatcaaataaatatttgtcccatttaacttcattttgaacagtagggtggaagagcaagaatgctagcaacagttgaccaacgtaaggaattacgcccagccaccaccaaccaccgttaaagcctgcgtcgtgcagacgacgaacagtgtgacctaattgtgctaaaaaggcccaaatagctgctgcaataaagaaaataataaaaatgatgaagattacaccgattaccttggcatcgccagaatcaaattcagtaacgctgaaaggagctaaaagcatgaaagcaagtaggtaacaagcaaatacgccgattgtcatgataacttggctaattgcagtacctacccagaatgaggttctagtagatctagcatcccacttaaagcagtcaaagaagtgttccttcaagatttgaccaatagttggtacaggaacattactttttgcgccacccttaggataatcttgatcgctgaacaagtatttgccccacttaacttggcgttgaacagatggctgcaattcaagataaaataaaaacattgcgccataaccagtgaaggcagcccagtaccaatagccgctgtagccaacatcgtgcaaacgtcggatcgtttgtcctaatgcagctaaaaatagccacagataaacaacagccgcaacaataccatcgactattctaatgccggggttgatgttttggttaaaagcatagaagccaagaaggatgcataagatgccgataacaagattaatcaaagtgctccaccagaaagatttacgcgtagttcttgctttccagttgaagggatgcaaataagcctcgttcaaaatttgcgcaaaactttctgcaggcggcagtggcagactttcgtcataaggcttgataaaataatatactctatcattcattttacttcctccaaaaattaatttgttataaattatacgctaaaaaagccgtgaagcaattaaacttcgcggcttttttgatattagaattcattatttctaaagttgctcaagaacttttgcgtcttttcattcttaggatggtcgaataattcttccggtgaaccttgttcagtaatgataccgtcactgatgaacaatacgcgatcagaaatactcttggcaaagcccatttcgtgggtaacgatcaccatcgtcaaaccggttgtagcaagcttttgcataacgtctagtacttcgccaaccatttctgggtcaagggcactagttggttcgtcgaacaataaaacttctggattcattgaaatcgcacgggcaatagctacacgctgctgctgaccaccagataattgttgtggcttagccttaatgaaaggatccatgccaaccttttctaggtttttcatggcaatcttgcgtgcttcatctttagaacgtttcaagactaattcttgaccgaccatgcagttttctaaaacatttttattttcgaatagatcaaactgttggaaaaccataccaacctttgatctaaaggtattgcggttatagccgggatgcaagatatttttaccgtgaaaatcgatctcgccgccagttggttcttcaagcaggttgatacaacgcaaagtagttgatttaccaccaccagaaggaccaatgatcgttacgatttcgcctttattgatgtcaaaggaaatatcctttaatacttggtgatttccataagacttttgcatgtgctttaagcttaaaattacttcgtttgattcagtcattaattatttgcctccgcatcttttggagtaccaacttggacttggttagccatcaagttgtaattcttattaccttcaagtctcttttcgataaagttgaagattctagtaatagtaaaggttaagatcaagtaaattgctgaaatcattaagtaagttgggaagaacttgaatgattgactggcaatagtagtaccaacgaagaacaattcagaaactgagatgatactcaatactgaagtatccttgatgttaacgataaattcgttggtgattgatggtaaacagtttctaatagcttgaggcaagatgatatgccacattctttggttgtgggtcataccaagtgcactagctgcttcgaattgaccttctggagttgaaataataccaccacggataacctcagctaagtaagcaccagtgttaattgacacaataatcaaagcagctacagttctatttaaattcaagtgccagaattgggcaataccatagtagattacggctgcttgaaccatcattggtgtaccacggaagatttctacataaacagataataaccacttaactacgttcaaagtccaacgcttgccgcgagtagttggagtaggaatggtacgaataattcctacaagcaagccgataaagaaaccaacaatggtaccaactaaagctaaaagcaaggtcatgccaatacctgacataatcatgccaccatattgcttccaagtagtaactagccagttttctttcttagtttcgttaccagccttaggttgttccttgatggcttgtgacattaattgatcacgctttttattagaaatagttcttaaagtagcgttaacttcatttaaaagcttggtattaccctttttaaccccgatactagttacggaatcgtcatggtcaactttgaagccagccattttgtttaagttaactgcaataatgttagggttaacgttgtggtaactttcaaattcaatatcttcagcaacataaccatcaatggtgccagaagctaaactttgacgcatggctgaaaagtcacgcatagctggttctcttttagcaccttttaattgcttgattaaatcgtagtgcaaagttccttgttgtgcggttaacttggcacctttgaaatcagtcaacttcttagcattagaatatttacttgccttattagtaattacgacgaaagtacttttacgataaggttctgagaaattaattgccttgcgtctttcggcagtaggagacataccagcaataatcaagtcgattttgcctgatgtcaaagctggcaatagaccatcccattgagtcttttctacgattacttttttgtgtagtcgtttaccgatgatcttggcaatttgaacatcataaccattagcataggagttagaatcatcaattggaacagctccattagctttggttggctgagtccagttgtatggaggatagtttgcctccatacctatttttaacgtgccagaatctttcttagcagcttgagtctgattgctactaagagaaaaaccgataaataaactgagtaggacagacattattacagccatccatctaaatcttgacttcaattataaaacctccaaaaatagttttaacataaagccaacacaataaagagtaaacaaaaacctcgctcttccaaagaattgcgagggtcataatcatcagtgtttaaaccaaatcttatagcgctccctgggaactaaccaggacagtctatagaatattgttctatagcccaacagattaacacgcgaatattaaatctatttcggcggcaaccctaagttaactatcattgttttcgcgaactcaaacttaacttgtgattgtcgcaacctctattgcattggaaaaatatttaactaatgaagaatactagaagaaaaagttaaatttgtcaagcccaaccattattagtttcataatttctctttttcatatcagaaacataaggatttcctgctacataaaaacgtaattttttgttagcccaaacgggatcagattgattgataccaacacgcgctgcagcaattatttcctggggaatttttttatgacgatcatcaagatcaatggcgaaaggggagtctgataaaaagtgcaaattccaatttttatcatgaataccaaaagcttgcatcatttttgcgggaccattagtcaaaagaacgccatctttaccatgacggttcttgatcatggtctcaattcctaaagtgggatcgattgcacggattaaaacaccctgtggttcattctgaaccctagtggcaacatcaaagaaaaaatattgacgttgcgcgtagatatagatcgttccgcctttgccgtaaagtccttcattcgctgggctacgacgaccgccataagaatgtgcagcgcgatcctttttacccatatatgcttctgcttccacgatatagccgcctaatttttcttgaccattatcaaaagtaagcattcgcccaattaggtcttttgcaatataatcggtagtgttagtagaaaaataagttgaataattcatttttgacctttctagaaaagagataaaaaataatgacagaaattaaattagttcgaatttatgaccatgagcaacctgctggttatcggattttagttgaccgtttatggccacggggaatgagcaaagttaaggccgatttagctgaatgggataaacaaattggccctagtaaggaattgcgtcagtggtttaatcatgaagatgaaaaattccctaagtttaagcaaaagtatattgaagaacttaatcataatgattatacagcggaatttttgcaagatgtaaagaagcatttggctaaagaagatgttcttttcttatttggtgccaaaaataaagagcacaaccaagcagttgtactcaaagaatatgtattaaatacgctaaacagttaaatatgtttgtgaccgtgttttttaactttccaaaagtggaagagaattgtcaaaattaagatcgcaaagacaataattgcaaaaacggtgtttggcaactcaaatctcaatggtggcagagctagtagcaattttaaagcgatgattcctatcaataagtaagccattggctgcaattctggaataatatccattaatttaatgataatttcggcaactcctctcatacagagaatgccgatcatgccaccgattaaaacaacaacggggttatcagacacggctaaagcagctaaaacagaatcaattgaaaagacgatatccattgattcaattgaaataaccgtacgccagaaaagagatagcacatgtctctttttctttttgcctttgtggcgagctgcttcgcgctcttctttttctttctcatgttcggcagcttgtttagggtggcgttgatcatagaagaatttaaaggctaggtaaaaaagataaatactaccagctaatttaatctcccaaaagttgatcagataagtcccgattccgataacaataaagcggaataaataagcaccccacaagccataaaccaaggacttgcgttgttcagctttattaggtagcacctgtgtctgtgcggccaaaacgacagcattgtcgactgataacaagcattccatcaagattaaagtcagaatgatcatccagtctttgccactggttaggacatgtaaccagttattgccgtcaaaaaagggtgcatatagtttaagaattgacatgtagttgcttcttttctaatttaattaatctgattttttctttttgtcccagacgataagtcccaactttattgttggataaaataactctttggtcaggaataaaaatcaaaacagggtttaatgctacggcgtgtgcaactgagcgagaagatgtggcttcggctagtgaattggcgacgtcaccataagttaacgtcacaccataaggaatatgctggacaacggctaatacctttcgttgaaattcagtgccgaattccgaaatatcaataggaacatcaaaattctttctgataccagcaaaatattcctttaattgtttgatatgaggtgccatctttttagggtcccgcaccaacatgcggtgagggtagaagctaaaaataggtgaaacagtttcatctcctttaagtccgacgtaagttaggccggcttctgaagctgttaaaaagtaggtccatggctcaattgtaacgtaatcatagtaaaaaaactctgtcatgtgtaacatctttattaaaaataattagtctaagaataacaaactaggaaagttaattcaaattctggaatgctgttaatgcatccccaattatttgcgtgacaccaggggtaggaatttctgtcttgttgatagagtaaattttggcgtcttctttgcgataagccaagagctgggcaaaaggataaactacaaaactcgtcccacaaatgatgatcaagtctgatttttgcattatttcaacggactggtttaatactttcggatcaatgccttcgccgtataacacaataccggggcgaataattccgccacaatctttgtgtaaatagcttttagcatattcttcataagaaacaggttgatgacatttagtacaataaatattatataaattgccatgaaattctgttacatgttgattgccagccttagtatccaaagtatcgatattttgggtaattaaattacctttttcattacaaaaatgggcgattttttcatggattaagtttggtttagcagtaggaaagtacatattgttcatgacaaattcatggaaaaattcaggtcgattgaatagcgtactatcgctcagtatagtttcgggactttcttgcacgccatcatagattccgtttttagagcggtagtcagggatacctgagtgggtagaaacaccagctccagttaagaatacaatatgttgggcattattaatatctgtttgtaattctgctaaatccatcatataatgtcaccctccgtgaaagtcactactttaattataaatcattgttttgttataatgactgaaaattgaaagcaccaaaatcaagctcaagtcctgtcactattgagctttcttagacgtaattagtttttatatgatctgtttcagtgcaatttgtatgaatcgtggcagttggttaataaagtcattgattacttcatctatcttttcaaaactattctgtttaagctcttttaattctgaaattaagtagaccaatgcatctacgaatctaatatcaggtaaggattcgttcattagatagaataaatctccgattgtcttatcatctgtattttgtctttcctgccaggtcaatagatcataagttattgctgtaactgcgatatagccacattggccatcatagctttgaacttgagatttatctaaagcaagatattgcttagacgtcttaaaatatgtttcaatttgccatctacgaccataaagttggatgatttcttcagggctaagctttgtctgagtagtagctaaaaccaaatacttgttcttgtttccacggttggagacaaagacgagctttaataaaaagctatgtccatgatattgagcctcaactatgcttgaataaagataatgtttctttttacggatgtttgaagcagccaaacgatcatacaagtctttaacgctatagcggcgatggcgataaatgtaataaatctttgaactcttcttgatcatgccaagtccatctaaaccgatcttctttaaaatccaaaacattcttggagaagaaaaccaagaatcgaataagacgtatttagcttctactcctaatcgtaaggcttgtctaatcaactctacagttacatcattcatctttctctgagcttgatttctccttttaccagaaattgaacgttcatcagcagtaatgggagcagctccaatcatatttttcttggttttggttgacatcaaggcaaagttaaccggcaagaaggtattgccatcgctccagcctaaagttaaaccacgatatccgttcaaatactcatgcttgtcatggtcatagactttagctagcaattcggtctttttagaaaaagaccgagccatcagcgtatcgtcaacgataaaagcaagtcggcgtcttttatcgataaatggttttaagcagccaatgagccgggctgcaatcaagcataatagtttttgccagttgattcttccatcgttaagtacattgcgagcagttctaacggaaaaacgtttgtcatccttagctctgaataaagaaagccgagcaaaatgtactgacatcagccaagagataatcatggttaatgaaacggtggatttacgcttaaaattgacttgtttagttaacttagctagaccaattagattaataaatgaagaaattaaggatttagtatcattttctgtgtcgatttgttctatactgttcattgcgcaggatctcctttactttttaggtcgacacttaaagtataacgcagagagagcctgcgtttttatttttgataagaaaaagccaagaggcgcggggaaggagcgttaatcttagctttcaagtttcagtataatgattaaaataactaaattgaggggatttttatgaaatatatgacgtatttttatgtagcaattgatattttattagtagtttatgcttgttatagttggtattggcaagctaaagttgattttcgtggtcgctatcgtatctcctcagttgtttgggcgctaatttttatctggctgggctttacatggaattacattgaaaaaggtgatccaggcctgagcgtcttcttggctctttttatcttaattagtattgtcgatggtttttcaggatttagtaaaaagcggatggtcgtttcaggctacttcaagcgtacagttaagtatgatgatttagccagcgctactttaatccagatccccaaccaagagaagccattagtgatggcgatttttcgaactagcgatggtaaggcttatatgatgcgctttaataatgaagttaatagcgtaattaagcaattacaagaatatgctggtcgagaaattcctgtcgaagttcaatcaatgatgtaattacaaaattggagaaagcattcgcgagaatgcctgcaaagtccgcaatgcgcgactttgcttttttatttcttccttagttagtaaatgcgagtgtttcatatcttcttcaaaagctgccaccattttctggttgaactttttatcataaaaaacggcattatcttcaaagtttaagttgtaagaacggaaatcttgattcattgaaccaactgaagaaaaatggtcgtcgacaatcgtcgttttggcatgtaaaaagccatcttcgtagatataaattttgacacccaagcgagttaattcgttggcataccactgtgtggcgcgataaataaaggggtggtctggcttacatgggatcataattcgtacgtcaacacccgatgaggcaattgtttgccacgtagcaaaaacggcatcatcagggattaagtatggtgtttgaatccataaccgtttgcgtgccaaaagcattagccgcatcataccgttacgcatatatggtgcataacgatcaggcccgtctgaaatgatttgcgttgcaacgtcgccttcgtggatgtttttttcatcaagatcaggaaatagagtggaattgaaacgtatgagctgttgattattagtgatagaggcattccagtccatgacgaaacgctcttgcaaaagcagagaggcagaaccaacaattcttacctgactatcacgccaatgaccaaacttcttttttttgcctaaatattgatcaccaatattaaaaccgccagtccaagaaattcgcccgtcgatgacaacaatcttgcggtgcaagtggtagttaatgcggtaacgggtgatcatgttgcgtgaagtgacaaaaggcaaaacttccccgccagctgcccgcaattgatcgaaccatgctttagtagctcccattgaaccccaggcatcataaattacgcgtactttaactccttgttttgcttttttaatcaatagttgcaaaacacgattgccgatattgtcgctataaaaagtgtagaactcaacattgattatttccttagctcgtaccatgtccttaagcatgtcatgaaagaaggtttcaccttcggtatagagcttgacctgattatttttagttaggggagcttcttgttgatggttaaaaaagttaattgctatattaccagcctttgaagtgtcagaaggactagtatttttaggtgctttagcaatcgatttttgaacatttctcaagccaatgtgtttttgcttattgatggcaaaaatattttcctgggaaataccccgaccaaagaaggcataaagagtaatcccgactactggtaatactaacaggatgattaaccaagcccaagtggttgaaacggatcttctacggtggaagacaacgtagaaggctaagattgtgttggtaatgataatgattctaacaaagtcatgccaccagatcataaactcctccaaaattaaactacttttttaatttaagaaacttgtcaataatatcgattacaaacggattgtcatgcatccaactatgttcggcgtcatctttaccgcgtacttctacttcttgataaaaatgtgcttttggggcaacgatatagcgaatgctttttgcggaaacaacagagatgaatttatcagtatttgtgttatctaaaacgttgccataaatattcaagaccgagatatcaggattgaatttgcgccgattaaaaaacaaataaaggtagtgcgggttcatgacactaggccgaccactttcggtcaaatagttgacgtttgggatatcgcccaagtaagtgaccccgtcaaaaggaccagcgataaaggcacatttttttaaatgtgggaacgttttgctgcggtagtgcttcatttcagtgcgaataatacatggacaggctaatgaatgagcgactgcaatatagtttttaaaaccatatcttttagctaaaaagggcaggacgaagttgagataatagtcgatgccatagataccgactattcgctggcgaaaagcaacctgcacgataggatgcttgtcactagtccaagttccttctaatttgaaatttcctaataaatcaacggttacctttaaaaacttgggattgcccttgtcataagtagcgtgtttcaccatcacgcgagtggtataatcaccgccgcgaaagccatggaaataaataatgggtacttgttttagatcgcttttttcaatgtttgccttattttcaatatggcgcttgtgtaatttgaggaaaattcgcgtgggagcgaaggtggccatcagccccaaagaaatcatgttaaacatgctaggttcttcttggaggtcatgtttatgatctttttcaacttcttcagcatatttttttgtgttgaaaaacatttttaccaccttctctttcttttttcctataataaaagttatgcaataagtatattttaccattgggtaaagattttggaattttagaggtagaaatgaagttttatgcagtcaaaaaaggacgtactccgggaatatatcggacttgggatgcagccaaagaacaagttgatggcttctctggtgcagaatataagtcatttgaacaaattaccgatgctacagattacttagattggaatgcccaaactcagagcgatgtcctgcaaaaaggtgaagataatttacaaaacgccgtaaaaagggtgcaacaaaagagtcaagaaataaaaaaagcaccgcgaaaaaaggcgaagcagtataaccatgttaatagcaatcctgctgacttctttgcggtgacttatactgatggtggcacgcgcaatactggtgtttataagggcggtcacgttaaaaagaccgataaagcagcctgggcttatttaattgaatgggatgaccagaaagttcatggctccggtggtgaatatggtgctactaacaataagatggagcagacagcattgattaatgcactaaaaaagctgcttgagcttggttttaacgataaacatctattatttgttcttgattcgcagtatgtgttgaatgcgattaataagcattggctacaaggctggaaaaaacgtggttggagacgttcttctggaccattggctaatgtggcggaatggcaggaattagatcggttattaaaggaatttcctgatagtacgtttgaatggacgaaaggtcacgctaataatcgcggtaatgaatttgtcgatcatgaattgaaccgttatatggatcaaaaaatgtaagaaaaaaggctacactgtagccttttttaatttaaaataacgccgccgaacaaaccactaaagaacttaacgatttgatcccacaaattttgtaaccagttgcggttttcttgggtattaaatttattgaagatatttttagctccattttgaatctgactggataatttcgaagcctgttgcttgaagttaccgtccttcaatgcccctgaatcacgaatttcaattagaagattgacaatttgatttttttgattgttgttgatggtgtcacctaagtggttaatattaatttgattgttgacaatgtcgcgaatttgactgtcggtaatgttttgcccttgtttagccatctcattcttggcaccggcaaccgcattgttcaattgagcatctgaataaccttttttgtttttattatcttgggtaatcccagacaaggtattcatttcatcttgagcggcattaacttgcttttgatttaatgcattgccatttttagcataggcagcataaactccagctaatgcccctgaaccatcaattggaatagcgctagtaacataaatgttggcatcgctgatgccggcggtcagggctgcgtttttgtactggttggcagtaatagtcgtgatattatttttaccatcgtagtctaaaattttaacgttgattccgctgcctgagctggtcttttggatcatcgcactggaccaaacaccggatgaagtggtgaaattatcaccagagggatttaaatatttaaccagatctgagccggtaacagtaattgtttgataattaccaccgtttagtggggcggttaaggtctttaatgtgccttgcttttgcgcatcagttaatgatgtacctaaggtaactacaggtgtatcatcatctgctaatactggcttagtaaatgagatcatcgcgaccacgcttaataacattgctgtgagtagtgtgataaatttcttcattttttcttcttttcttcctttttgatcgaatatttattcttgtaatacggaacattatactaaatatttttcaaaagtgaattaaacaacacgtaaaactttcttaatttcgaccttattattgaagatggtataataaagagcaacaaagggggacaatatgttacaagtgcctaagttaaccatcatcatgcctgtttataacacggcgcaatacttgccacgtgcttttgatgctctgcttaatcaagttgacaagagcttcaaattgcttgtagtagatgatggctcaacagataattcggttaaggtagccgaaagctatgccaatcgttttccatattttaaaataattaaaaagaaaaatggcggcccatccgatgcacgtaatgttgggatgcagtatcttgacacaccatatgtcacctttcatgatggtgatgattgggtggatccaggctacacatccttttttattcatgcttttgaaagtcatccagatgtcagcttagtatcatgtggctattggatggattatcctgacaaaaagcaacgcgttgttggtcgaccagaaggtggctatttaacgcgcggtgaaacttatttgaagttgactaatgtctttagctcaccaatgaaaggatatagctggaacaaggcctataaaactgccattattaagaaatatcatttgaagtttgatagggatatttcactactggaagatcagatttttaacgttaaatatatttctgtggctaaaggcgtctactacacgcaaaaaccttattaccactactggcagagaaagggcagtattattcaccagcctaatattaaaaaagttgcggataatttccggggaaattaccgggtttggagcaaaattatcagtacaatgatgaaagaccgcgaggaagaaaagatgcgtaagaagttagagcgacagcaggccttgcgtgatagtgaataggggaaaacatgaaagaaaaagttaatggagtcgaaatttattatcataagttaggtaaaggtgagcctttgcttttactacatggacatcacttagatggtggtatgtttgataaaattgtggctccgctttctctttattacaccgtttacgtgcttgatatgcggggccacggccttagtgaaggcgacattgcggaacactacaagaccgaagtagaagacgtctatgcctttgttaaacaggttggcattgaaggctgctattgcttcggttttgatgcaggtggtctggtggcaatgatgctagctagaaaacatccaacgatctttaagaagatgattgtagctggcgttttcgttaatggtgcaggcattagaccatatcactacttaacggaaggctttcatcgctttttgagacttgatcgtgacagccgcgtagagttgactgagtcctttatttcagtagatgacttgaagaagattactacgccaactctttgtgtagtaggtgaaaaagactgggttaaggttgagcatgtacgttggtatagccaatttatgcccaatgcgcggttggtgattatgccacggcagacgcatgacagttatgcagtgcgcagtttaaaactgctggatttgattaaaggattttgtaggtaatacgcgtggtgctagttaaatcgttctaggcaatatgccatattataagctaaaatggctatttctagccgctgctgaaagccagctaagctccttgctcggttattttcagcgttatagtaactgagcaaagaaaagtcgctttcaattgttcttctaattgccatcagttgatgattattatgttttttagcacctttcatgttttttcgatatggtgtccaaaggacatagcccataccttttaactcggcagctaagtcttttcctaagtagccttcatcgcctaaaagataatggttaattggatgagcattaatcatcaattctgtcgtttctttggcatcatgcactgatgctttagtgactgcgtagtcaagcaaatagccatcatcgcttactagcgcgtgcaccttgaaaccataataatagactttcttggttgctttatagccaatatcggctatgtcacggaagatcttaacacgataattacgaacaggctgacaaactggaacaggaaaactgtcaataattaaaaattctccagcaacctttacctcttgattccaagcttgacggatgcagcgaattaaaggcaaaagcatcttggctcgacgattaaagcgagaatgagataagccaacaaaaaatttacagaatcttctttgggattcaattccaatttcagtttgccaaatgagcatcgctaagatggagctgtcggaaagctttgtttgatcaatgttttttcgatgcgtaagcttatcaggcgcataaagattatatagtgaacgacaaattacatttaaacgactaaaactaacttgtaaatggtgagagaaacgattaagcttgaggtagttcaattagatcagactcttttctatttaatttacttacaacttgagtctaatccgattggacttttttattaactaaaacgatttaactagcaccacgcgtaggtaatgtggatagtattgctggttaacgtgatagttgctgcagttgctgttatatttggttttcaaaatagggtagaaacattaaatctgttcaatgccggtatagtttttatcacttttgggattgttttacttttaggtgcaattcctgtttatcaagatttcagcacgtcatcaattttaatgttcattgcaggcattttaattattgttagaattattatgctagctgttagtttaattaccaaagtgccaagaacagtaaatctacaggatattgcaatttcattgatgatcgctgcagtttgtttgatatatttcatgcacggtttaaatctgagcttaagtaatttagtcgtgccagaattagcattgattattggcattattttgttttattttaaaagaaagcgtcaataaaattgattgcaaacatggacatctcttcaatagaggtgcctttttgtatataatggtggtgtatacgatttttattcagaagaggtaaataatgaacaaggaagaacttcatcaattattgcacccaatgaaagttattggcttaggtggtaaccctgcattaaatgaaaaaattgcggcaattttacaccaaccattgatcgaaactgcggttcaccactttagcgatggtgaaatccaagttaacattggtgaatctgtcagaggttgtgatgttttcgtaattcaatctatccaagatccagttaacgaaaactttatggaacttgaaattgttttggacgcacttcaacgtgcatcagctcatataattaacgtggttgtaccatacttggcatattcacgttcagataccaagactcgttcacgtgaaccaattaccgctaagttagtggctaacttgcttcaattgactggcatggatcgtttaattactgttgatctacatgcctcacaaattcaaggtttctacaatatccctgttgatcacttacatgccattccacttcttggtcaatacttcttagataacggaattgctaccaaggaagatgatgatatcgttgtagtctcacctgatcactcaggcgctaagcttgctcgtaactttggtcaatacttcaatgcaccgattgcaattgttgatcaaagaggtgctcgctatgatactgaggtccacgacatgattggtgatgttaaggacaaaaagtgtatcatcattgatgatttgattgatacaggttcacgtatttcttcatcaactaagtcagttttggcagctggtgctaagaaagtttacgttgccgcaacccacgcacttctttctaagaatgctactggagtacttaatgaattaccaattgagcaaatcgtagttactgataccattaagcacaagcgctacccagacagaatggtcagaatttccgtagaccaattgcttgctcgtggtatcgattatgtatacaatgatcgttcaatccaccaaatctttgacgaacaaaaccgtttaaagtaaaattcttattgataatttgaataaaaaatgatcctcactatgaggattattttttattcaaaaaatcgggtagataagttataaaactatgtctaaatagtaatgattgatataattgatatgtgttgtatagaaagaaaaagagaaagttagaggaatagactatggcacgacggaaaaacatgaagagacggagagttattctaggtaatactttccatctgatcagagaaaatggaatggataatgtttctttgcaaatgattgcagaaaaatcaggcatttcaaaatccttactgcagtcatactatcctcataaggctaagttaactaacgacattatccgcaatctttttaatactttaggtcaacaagttaataattatgacatggctaatagcaatcttccttatgctagaactaaggcatttatttatacgattgctatcttggggatgcacgatgagggcttggaccgtattatttctgaagcttttgttagcaatgctaccctagataattggggaatcatgcttaatgaatggattaaggaaaatcatttatttgatgacattaacgttgacgaaagcgaacttgagacaggaattgcgtttgtaactagtggtattggccgtctatatcatgatcgcaaaaaacaccatttaacggccgaagctcttgctaactatgcaacaagtgcattgatgttcagtttcttgcattgttcttctgaagaaattgatcaagccttaaaagaaggacatgaaattattgaaactgctgatatggaagttgttcaccgagcaattgatacaatgttcgatgaaggcaaggaaattttcagctaaaggggagtcgccatggttgaaggcaaaagagctgatttgcgacgaatgggttatgagcaaaataaccaatataaacgtttgttggctttcgtcatctttttgattgctgcattatcattgattacagctacttttttaaatccaatctttatgaaaaaacagattaggactagctataatagggcagtagttgttcgccaagtgaataaaaattatgatagcctagctgatttgattaatgcagatagtgaagataattcaaacttactatcggatacgcaaactcaaccaattgccgaccatattattgattattctttgggtattcattggtttaaggttactagtttgccactggctaatcagattttaagcgatatcgatcaaggaattgctaaaggctcgtcaagtggggcacaggaagttaaccgtaaactgaaaaagcagggaactaatgcaccttacgcgattattaaagccttcaatttaagtgtgatcactttaggagcaaatattgctggtttattgtttatcgttaatttgataataattattgttaccattattacaatggtttcgctactcaacgatatgaagtcgcgggctacaattcgaatggtgattcatgatacgatggctgctggcatgtgggcaggtttttggctaattttgatttcaggcttgttagcacttgtgccagtaatctttaatgtcgataatatcgaatttggctttttgcttgagattggcagtagcgtctttttggaatatgtaattgctggggtaattatttacatcatttgtgcgataccatggcaaattacagctgctaaataagaatgagaaaacgtaatctgtagaatgattacgttttttgtttgcacaaagaatcatctttctttataattaaaaaataattaacaaatttcatatgtttatattttaaaagaattgggcgagtttatgaaaaaagctaaaattataaagacttttcttgctttcattactatgctttcgactctttttttgtttaatcagcctgttaatgcagccaataaggaggttgagactggctcagtgatgaaaaaaattaagcagtcgaaagaattagtagtgggcacctcagcggattatccgccactggagtttactaccagtgaaaatggcaataccaaatatgtgggggttgatatcgagttggcaaaagatattgccaaggatttacatgcaaagctagttattaaaaacatgagctttgattcacttttggtagcgctagagacaggcaaggtagacatggttatttcggctatgacacctaatcccgagagaaagaagagcgttgatttttctaagatttattacaagccaagtggcgaatatttcttaattaacaaacgcgatcaggccaaatacaaaaaaattaaagattttgctggtaaaactgtcggtgcgcaaactggtagtattcagtattctttgattcaaaagcaaatgaaacagtctaaggttaaaggcttaggcaaaatcaacaacttagttctggcattaaaatctaataagatctctggcattgtcatggaagaaatgactgctaaggcctaccaacaaaacgacaatagcttgatggctgtgagaagtgacttgcgtgaacaacaagctggtaacgcagtagcaattgctaaaggacaaaatgacttagtagctgctgtgaacaagactattaatcgcgttgaacaaaaagatttgattaataagaaatacttgcctgaagcagctaagtatatgaagacagcgcagaagacgaacacgatgactaaatatattccttactttattaagggagttggctataccatcgtgatcacgattttctcagtgttaatcgggatcatcttagggatgctcttagccttaatgcgtttgtccaagaataaattgctgcactggattgcagtttgctatatcgaattcattcgtggtacgccacaaatggtgcaaattttatttgtttactttggtgttggagcattaatttctaacctgtcagctgttgtagcggggattatcgcaattgggttgaactctggtgcttacgttgcagaagacattcgttctggtattgcttcagtagctaaaggacagactgaggcggctagatcattaggtctttctcaagctaaggcttaccgctatgtaattattcctcaagctttgaaaaatatttggccggcactaggaaacgaatttattaccctgctgaaggacagttcattggtttcagttattggggtaactgaattaatgtaccaaacggaattgattcagacttcgacttaccgtggtgttttacctttattcattgccatgattatttactttatcatgacatttactttaactagattgcttaattatttcgaaagacggatgaaacacaatgactaaaatgatcgatatccaacatttgaagaaaactttcggcaaaaatgaggttctgaaagatatttctgcggaagtagataagggccaggttatctgtattatcgggccatctgggtcaggtaagagtactttcttgcgttgcctgaatgtattagagcgtcctacgactggtaaaattgtttttgatggaacagacttggctagtctaaaggatggtaaggaacttgatcaattgcgggaaaagatgggaatggtttttcagaactttaacctttttcctaatatgaatgtaattgaaaatattaagttggcaccgatgaaagtcaagggtgttagtgaagctcaagctgagaagactggactagtcttacttgaaaaggtgggcttggccgatcgtgcaaaacaatttccagctagtttatcaggtggtcaacagcagcgggtggcgatcgctagagccctagcaatggatccggaagtaatgctatttgatgagcctacaagtgctcttgatcctgaaatggttggcgaagttttgaaaacaatgcaagatttagctaattcgggaatgacaatggtgattgtaactcacgaaatgggatttgctagagaagtagccgatgaggtctggtttatggctgatggctatttacaagaaaaaggcacgccacaggaagtgtttgaacaccctactagtgaacgtgcaaaagatttcttatctaaagttttataatcaaaaaggctcaagcattgcttgggccttttaatttactcatctgtaatgatggggtttgataatacgtactgtcttacgaaaaaattttgatgccatcctttttgaattaatgcattaaaaaaggtgttttgattattaggcaaagcagtggctttgggaatgatgacagcacgtaaaatcttgttttgaagtaaaattggtgattgcacatctgtttcgctatttaaattagtggttgcttgattggtcggcgtgttggttgtatcctgctgaacttgataatttgtagtgtcattagtactatcttgcttaaatagcttgaatctgtacttctgcacgcctttaacgtcaacttcatattcatgtcctgcaactaggttagtatttgcgggtgaataagttaggatcgttctaaaattgccgtagccacaggagctgtaattcttaacatgagctgcagtagtaacaactttagtatctaaatcagtgatagtaattgttggcttatttttaatggttctatctgataaatagagcgaccacatgatatttttcccttgaagcaattcaatagggaaaagacgcatgctaggataagcaactaccggctgactagcaggacgaaaagtatcattaatgtttagtactttttgaacggaatagcggtagccatttgtaccataagctgccccaatgcctgtagtggttaaacgacttgaaagtagccaagctcggtgaccggtatctgaaccagttaaattataatggtcagtaattaagtcagtgatcacatccccagcggtttgctgtgaaacattaaagtttaaatttgaagtttcagaagtgtctttagctagcttccaaacaaatttggagatattgcttggcttagtttcactaggtaaaccatgttggttaatgaatgggttagcattaattgcggccattacagcagccgtaatctgcgcgtttttattaagtgtatcagtagtcgagatagcgggcagactgaacaatgatcgatagtaattgatataatctgtttgcgttttaatgtattttggatctaagcgacctaccttaaattttttgcttagatttggctttttagcataaatatttgcggcactataactagttttatcaaggttcgcatattccttttgaaaattatgaacttcgttaacttcttgtgttgtgaatgtcgctgcttgtgtaacttgtccggcgagggggataaataaagttgcggcagcggcaatagaaaatttccgtagaagcattttagactcccttctatggttgtcagtatacctttcattataaactataaccaatgaaaaggctttagtgaaaaatattccactattttgcgcttttctggtattctttgcgtataattaaagattggaacatttaaaagaggtataaaataatgactaaaaaattacaagttggtttgatttttggtggtaattcatcagaatatgaagtatcaattgtttcaggccgcaacatctataaagcaatcgacaaagataagtttgatgtgcacccaatttggatcactaatgaaggctactttgctaatgaagaagaaagcttcaaggttttagatgatccttcataccaagttaagaacccacataaggttaacaacatttctaacttaattgaattagaaaacttgccagaaattgatgttttcttcccaattgttcacggtaacttaggcgaagacggtgttttacaaggtttgttccgcttgatggataagccattcgtcggtgatgacgtcttaggagccgctgtaacaatggataaggaattcactaagatcttggctcaaagagttggtgttccagtcgctgattggatttcaattaagcgttttgaatacgacgacaagaagaatgctaaacttaactatgaaaaggtagcagaaaaattgggccgcgacatgttcgttaagccatctaaccaaggctcatcagttggggttagtcacgtaactaatgctgacgaatatactgcagccttaaaagaagccttcaagtatgacgataaggtcttagttgaagaaactgttcctggcaccgaggttgaaacagctgtcttaggtaacgacaagccaattgtagcaggtgttggtcaaatcaccaatgcaaaaggttcattctacacttatgaaaataagtatgatgataattcaacttctaagttacaaatcccagcagatttaccacaagaaattatcgatactgttagagaaaatgcacgtaaagtttatgcagcaactgaatgtagcggcatggctagaattgactccatgctcaccccaggtggcaaggtagtcttgactgaagttaacgctttaccaggctttactaatatcagtatgtatcctaagttgtttgaagaagcaggtgttccttacagcgaattgattacacgcttaatcgaagcaggtatggaccgttttgatcataagaaaactttgcttcacaagcatgactaaacgccaaaaatatagaggtagatttcaatgacgactaacaagcatgattttgaagaattggctgcaccaaaagcagctgcacaagaattaggaattagtgttgccacgttaagaaagtattctttaatcgtggagaaggtgaccggcaagagcgactattttgctcggactaagcaaaaggctcgtctgtatcatcaaaaagatattgatgacttaaaggcttttcaccgtttatctaaaaatagtggcttaactttgcaagaagccgctcttcaaatctatgctgttagtgaaaagaaacctgaacctgaaactaaagaaccagctcctaagcccgcttataacagtaccgatgtaatggatactgagcaggtggttaagttgcttaacactttgcaaaagacaatttctaatcaaaatgaggcaattaattctttgcagaagcaattgaatgtcattcaaaagcaaaatcaagatttaattgaagcacaaaagcaattagctgcgccacaagatgatttagataagtttgcggctttgccagatatttctggaattgtgagtgcggatgaacctaaaccgaagagtgaagaagaaaagcgcgctgaagttaaaaaagacatgaataagagtcaagaacaaatgcatgacgagattatgtctaaggcaaaggaaaatgccaagaagcgggctacttcaaatgttcaccgtacactagaagatatgcaattaacggaccaaaaggaacactggtggcaaaaaatctttaagttttaaacaaattgattaagaatcaagagctgacctaacaaaaggccagcttttgttttacagtaggcgtataacaattaataggaagtagaagtaatgaaatttaaatggaaaaagcgctatacgatagcagttatcgtgacaattgtaggagcattattgacggtcttgtcctattttgccactgatatttaccacaaggacgacgttgccgtgattaccgatagcaagatcaaggatactttgattgaaaaaagtgaagatgtgtataaaaatgcggatgaaactcgccagcaaattttgcacttaaaagttttatcgggtaagcacaagggcgaaacttacacgactaaaaacgtgtattatccttcgcaattgacgacgcaaaagtatcgtgcaggtcagagaatttttgtcaatatcaagaagggtgatccagcgatcgttaatcctaagcgtgattgggtgttagttttggtagtgacaatcactttagcattgatggtggctgcagtagggaagcactcactctcgctggttgtgtcaatggtaatttcgtggctgatcttttatttgattatcatttgggatgtgcatttgaatggcgcccacattattttgctgtttggcttagctgatatcgtcttttcattctttagcttgctcattgtgcagggcttgaataaaaaaatgttggcgacttggttggcaacgctgctaggagtatttgtttcttttgccttgtgctacgtgatcatgaagttaacgggtgaatcggaaatgaaatatgagaccggtgactatgcaacgcaagatccacgaggcttgtttttagctcagactttgattggaattttaggtgcagtaatggatgaggcgaccgatattatttctagtttgtatgaattaattcaaactaaaaagaatattacgatgagacagttgattcatagtggtcgaacgatggggcaagaaattatgggaccgttgattaatgtcttggtcttaatttttattgctggtgcgctgccagaaactattttgtacttgcgtgataataatactttagcttcaacttttggctttactctgtcgctgggggcaacgcaaagtgtgatttcggcaatcggaattgttctgacggttatttttgcgacaggatgcagtttgttcttcttgaaaaaacgcgattggaagagtttgtttaaaaaagaaggtgagaataaatgagtacattatttgcattgatcgttgtcttagcgattttaatgacaatcgtcggtggtgaaactggaattcgtagtttttttagtgtgctaattaatacgattctattgatcttagtggcgatgctaatatcatggggaattaacattgcaattttgacgctgatttttattcctttaaagctagttacgattatctttttaggcactcatgactatacggtagcaaagaattcattttattcttccttcttagtgtgtttgattattagcctctttattttgggttgtcaatacctggctcaagctgcaggactaggaccagaggcaggagagttattggttggcttgtcgcagatgccgggcttgagttatccgatgattgccgtgacagtggcgattttctcaactttgggtgcaatcgcggaagccgcggtagcaatgagttcgggcttgctagaaatcaagaagcataaccctgctatcggtgaagaagagttgatggcttctggtacggttattggtaatgatgttttgggtacagcaatgaacacgattttatttgggatgttcggtagttttttatcattattcttatggtatttccgcttgcattacacgattggtgaagttttaaatgaaaaactttttgtaaatgaagcgttaattatcatgtattctttgattggggttatattaacagtgccactatcatcatttatgctatcaagaggaatgagcaagaaaggaccaaaacatgagagtagaaagtctgacgctgactaactttaataatcgtgaatatcaagttcatacatatgcgctagagcctaatcctgaattggttgagcaaaagcgcccgctagctattgtagtaccaggtggtagctttaatcacttatccaaaagagaaggcgaacccgtagccttagcatttaacaatcaaggcttcaacagtgtggtgatggaatataacttagtgcaagatccagacaaaatttaccctgatgcggggttagatgttctaagtactgtgaaatatttcagagaccacgctgatgagtatcagttagataaagataagattttaacagttggcttttctgctggcggtcatgtggtcagtgtagctaataacatggctttaaataaaaattatcagacaaagtatgattttgataagactgatgttttacctaataagacaatcttaggctatccgctgattgatattaaaaagattggttttccgattccagaagatcaaaaagcaaaaatgcctgtagaggaagagattttggatagtgcattaggtgttacacgtgaaacgcccgatacatttattttccaggcatgggatgatccggtggttttgatcggaaattcgattgaatatattggtgctttgaataagaataaggattcagcagaagctcatttgtttaaccacggttaccacggcttttcattggctcgtcacaatgtggaaactaaggggcaagattggcaggataatccgcacgcggcgcactggttcaacttggcaatggaatggctaaagagtgagtggggcgaatgatgtgaagcataaaaaatcttctaaccctaatgacaatatctatcacactatcgtcaagaatagaaaaattgaccgaatgattatgccttttgaagcggtgtactgcgtgtggctaatcattacgctggttcttagctttaagctatttgcttattcgattgacgcacaatttgtgctaatttctctattttttcttagcgggtgggtttcgtcattggttaagaatcatcgcatgaagaaaagtagaaaataagataagtaaaaagagttctcgcacgagaactcttttttattagaatcatttactttttatctctaaagaaaataacttccttagcagctacaaatggtccagatgacttgtaaacctttaatctaatagctttggcatcgacatttcttaagccaacaaccttattcttgctatcagacttccaagtcaagtgatcgccgtatggcttaaagttaacgccatcgcttgaaagctcgacactaacttcaacaggatcgccttggtgatcaatctttctaggtacccagcccattcgactcaagtgttccaaatgattaaaggtgaagtttaattcaagtggcttgtcttcgctgaccccatcaatggtttcccattcacttgctaacttcaaatcagtcaagtaatcaattggatgatccttaggactagctagactgctcgtgacatgaatgtcattaattgcatagttcattggatcgggcttggtaattgcgccaaacggatctgaccattctgaaactttgttgccagctacataacgcaaacgcagggtgtagcgggtatttggcactagttcatggaaagtaaatgaattaccatcaatgccatcatgtaaaatgccgttaacttcgatttgaacttggtcggttaattgcggccaaactactgttaatgaatgagagctaatcttgtctggatcaaccattggttgttttggtgaacgcaacagtgaatccgtaatagcgtgaaccaaagtttcattgccatatctgaagtttctgatcgtaatctcaattttagaatcggtaatatcgcgtttagctaacttaatttgtaaagcagtttgtttcttttcttggtattgatcaaattcaggcatccagctgtaatttgtgttaaagaagaagccttccttagcatgggcgaaggtatcaacggtaccgtactcctgcatcgggatttccttgtcgttgattttaacagtcaaaccatcaggataaccgtcacacatgatgttcaagttggtggtgttttccgtttggaaagtattgaaatcgccttgagttgggtcgatggtgatcgtcaatttgcttgcttctaaatcactcgtgatttgtgtagctacatggtttcttgaatagtcgttatagccgttatcatcgtaagtaaccattttactcttgccttgagggtagaggacatagttgcgttcgccgaggtcaaaaatagcgccgcctcgtacaaatactggtaaatgccaggatgggtaagactgcttattataaacgcgtccgcccaagtactttttgccatcaaataagtcaacccacattgttctgtggttaggcaagtaaaggttgtcttttcttgaattgccattaccatcttcgcgaccgttaacaattggcgaaatcaacaagttaggccctaacataaattcatggcccacctgtggggtgtagttgacttgttcatgtggaaattccaagaataatggccgcaagattggctcaccgacttgagcgcggtagattagggtatataagtaagtctgcaattgctcacgtagttttaaataggctcgattaatttgcgtcatcttactattgtaagcaaatggggtcttactaaatttaccttgatcgtctaagttgaacaggattggggtaaatgccttccattcaaaatcacgaatggcaatttgagcattaccaccgccagcggtaccgtcaacggcactaccaactaaaggctggcccgaaaggctagcccccaaaaagccagcaacttgtgttggaatgttttcccagttgccgccaatgtcaccaaaggctagcattgttctattttgactaccagcaataccagtattagagaaaatcaacggccgcttacgcttcaaattgttgcgtaaaattagcgcatcatttttcaatacttttggatcggttgtgtccgtttgaataaaggtggtatcaggtgaagccttcggtgtgttgttttgactccaaagaccagcgctaacgtcatgtatagcggcgtattcactgaagctagccatggcttcttcgttgatttcttgcacatcatagttaggcacgatccaacttaatttaaaatgctgcttctggtagcgatcaaccattgcccgtgctgagaattgatattcttcttcgccattcaaagagcccttgccactagcatcttctggcttgttagttctggtgtaataattaccgtcttcaaacataacagcattacgttccttagctttaccaggctgccataaggtagttaaaaagttgccaacatgacctaatcctagtgcatatttaggtggcatcagcggcttacccgttaacatgtaatactttgccaaaatatttttgggtgaattacctaatagataaaaggtatcaaacatgttggtgtcgtgctttaagatagtggcatccggattgcttttaccaaagtcataattgccagcactctcagtattgcgcaattcaccaaagccggagttagcccagaagaatggcacttgggtcaaaacgccgcctttaccggtaatcttgtcgcgcttgattgaaatgatttcacctttatgactgaagtagccgttctgcatcccgccaccaaagtaaaattcattcttgtgttgcttcaaaatttcggtagtttgatcattgcctaattcaagtggactcagctgaaccaaacgattgcggtgcagcgtctcgtcaaagatgctcattacggctggcttttgttggaaaataagttgataattgccagacttaatgattaaggaatcgctggttgccttaggctgtgatttttcaaaatagtcattgttgaattgagacaggtcaacaaaagatgagtgattctcgtcaaacttcttagctggatcgagaaaatatctgaagatcccgtcagctaaaatataaagacgaacaatatcgccggtggagtagtgaagttcataataatgatcacgtttgttggcaccgataagttggcctagttgatgtctttctatttggttttgtgtcatatttattcttcctatttaaacttgctaccttatattataactaaaaatcaaaaaacttcttaagcaattgtatttactaatatgcatcaacaaaaaaagctctgctattatgcagagccaccgcgcgtttgcaagttatcgtcttactgcgcatgcatccatgatcattggacgcgacaatcttcctatgcacattatagcatgataaaaatacgatgcttgaactggtatttaccaattttgttagatataattaaattaacaattacgatttagacatataaagaaagaagatatttatgacttattacattcatgcagataaatttttcttagaaaacagaacagaaaacggcggctatcttgaagttcaagataatggcaagtttggctttttctatccagaaagcaaaaagccagaaggtaagattgtcgattatgctggcaaatgggttgcaccaggattagttgatacccacattcacggctcattgcgtgaggatgtaatgaagagtgattgggaaggtattaataagatctccaagggcttgcttagtgcgggggttacttcatggatgccaacaacgatcactgctgcaagcgataccttaactagaatttgtaagatgtttgcggaccatcaaggacaagaagaaggggcaaagattcaagggattcactttgaaggaccattcttcacggaagaacatgctggagctgaaaatcctaagtacatgatggatcccgatattaatgaatttaacaagtggctggacgcttctaacgggatgctgaagaagatttcaatggctcctgaaagaaaaggttccaaagaatttattcgtgaagccgttaaggaaggcatagtagttgttttgggccactcaagcgctagttttgaagaagcagtcgcaggcgttgaagcaggtgcaaccatgtttactcatacctttaacgggatgcctgatccaagccaccacacgccatcaatttctaatgcggcaatgacgcttaataatgtgaccgatgaattaatctgtgatggccaccatgtgcaaccatgtatggctaagactttgattaatgcggttggtcctgaacacattgccttgattactgattgtatggaagccggtatgatgccagatggtgattacatgttaggtgaattgccagtctatgtaaaagatggcatggctcgtcttaaggatggcgacaatttggctggatctatcttgcaattgaagcaagccgttaagaatgtagttgactggaatatcgttactccagaaaaggcagtgatgatggctagttatgttcctgctaagagtgcccatatcttggacaattgcggtacaatcgcaccagataaggatgccgacttcttgattttgaatccagatttgaccttaagtgaaacttacctaaatggtgaatcacgttataaggcttaatttgttagtctagttttaaatagtcctcattagattgagggctattttttgaccctaaattttggcaaatagtatacaattaataatagtaaagtaggtattatacattaggagaaatttattatgccagatggagactgtaaaatagtttgtgtaaggatgaatgattccttaaatttatttctttaaacattagaaaaaggagttcctttctcgtatgattggtttgaacaaaaaaaacacatacagaaagaagaactccttcatgaatgattttaccaaagattttgctcaagctctattcaatccagacaaaataaatgatttattgcgcaaagagctacaacaggctgttaataacttgctagaagctgaattgactgcctttctgggctatgatccctatgccagaaatggctggaatactggcaactctagaaatggtgcttatttccgcaaagttgatacgcaatttggcccaattgaagtgcaagtgcctcgggatcgcaacggtcaatttcatcagcacacgctgcctgactacaagcagcactcggatgtcttggaaagcatgattatcaagctttattccaagggcgtgaccaccagggaaatagccgatctaattgaaaagatgtatagcagccattacagtccagctcaggtatcaaatatttccaagcagatgattccaaaggttgaggcttaccacaaacgcaagctaagcgacaagtttttctgcgtctatttggatgcgacataccttcctttgcgccgagaaacgtttgagcgtgaagcagtctatattgccattggcattaaacctaatggacataaggaagtcattgactactgcattgctcctagtgagaacattgaagtctggacagagatgcttcaaaacatgaagtccagaggcttgaagcaagttgaactctttctttctgatggtgttgttggcatgaaaacagccttggccaggacttatcctaaagctcattttcaacgctgtttggttcatgtcatgcgcaatatctgcgctaaagtacgcgtcgacgatcgtgaaaagatcatgaacgaattcaaacaggtgcatcaacagacaaacaaagaagaagccacagctgtcctgcatgacttctataccaaatggggcaaggtttacagccatgttatcagaagcttgaaagacatagaaccagatctgctggtcttttataactatcccaagcagatcagagcttcaatttattcgactaacatgattgaatcatttaacaatgtgatcaagcgcaaagctaagcctaaggcagagtttccaactgaacagtcgcttgatgcttttattggtattcaggcaatgagctacaatgaccgttatttcaatcgaattcataaaggctttggtcaggttcaggacaccttagaatcctactttgattaaataaataattaaaaaatcaatttacgagaaagaactatttacacaaaagatttgacagtttcgccagatggaatcagtcaattactagtactttttatgtaataactttcaattaattgaataatttgtactcttattgattaaagaaaagtatcacatatgtttcatgaatctcgtctagccaagtaggtgagattttttattacgtttctatgtaatcgctttcaattttaaaacaaatgtgctatattatgagtgtaaagaaattaagaaataaaaatattaaataagtttaagtaaaaggagagaggtgagttccgatgggcacttgagagtagaaagtcatatatatagaaaggtttgtgataccaatgggcatcgtaaattgaaaataaaatgtagttcaataatcatcaagtgatattaatgtacataagaggccgtgaaattattagtaggcatagaataataactatttgatgaatcacttggattaggattaagaaagattttcatacatgataaatattaataagaaatgacccttcgctggaatgaagtatgcgaagggtcatttaattttggcttgaaaaacgtttggtatttagcattattgttatttgttaaatataatatgaagtacatgtactaggccgatagagaggaaagttatgacaacagactcaattaattttaaaatcgatgcagaaagtaaaaaggtgatgattaaagaattagcaattattaatggcttaattcctgatgatgataatacagtagataatctaaatgattattttaaaaacttaggaatttaatggtttattggtcttttatctgatgtagtaaatcatgatttagtaagtcgtaatttagtaaaatataatttagaagatggtgatcttatgtttattggagagactgtaaaatagtttgtgtaaggatgaataattccttaaatttatttctttaaacattagaaaaaggagttcctttctcgtatgattggtttgaacaaaaaaacacatacagaaagaagaactccttcatgaatgattttaccaaagattttgctcaagctctattcaatccagacaaaataaatgatttattgcgcaaagagctacaacaggctgttaataacttgctagaagctgagttaactgcctttctaggctatgatccctatgccagaaatggctggaatactggcaattctagaaatggtgcttatttccgcaaggttgatacccagtttggaccaattgaagtgcaagtgcctcgagaccgcaacggtcagtttcatcagcacacgctgcctgactacaagcagcactctgatgttttggaaagcacgattatcaagctctactccaaaggcgtaactaccagagaaatcgctgacttgattgagaaaatgtatggcagtcattatagtccagctcaagtatcaaatatttccaagcagatgctccccaaggttgaggcttatcacaagcgcaagctaagcgacaagtttttctgtgtctatttggatgcgacataccttcctttgcgccgagaaacgtttgagcgtgaagcagtatatattgccattggcattaaacctaatggacataaggaagtcattgactactgcattgctcctagtgagaacattgaagtctggacagagatgcttcaaaacatgaagtccagaggcttgaagcaagttgaactctttctttctgatggtgttgttggcatgaaaacagccttggccaggacttatcctaaagctcattttcaacgctgcctggttcatgtcatgcgcaatatctgtgctaaagtccgggtggatgaccgcgaaaagatcatgaacgaattcaagcagatacatcaacagacaagcaaaaaaagaagctgcagctgtcttgcacaaattctatgccagatggaataaagcttatagcaatgtcatcaaaggtttgaaggaaattgagcccgatctgctggtcttctacaattatcccaaacaaatcagagcttcaatttattcaaccaatatgattgaatcctttaacaacgtcatcaagcgtaaagctaagcctaaggcagaatttccaactgaacagtcgcttgatgcatttattggcatccaggcaatgagctacaatgaccgctatttcaaccgaattcataaaggctttggtcaggttcaggataccttagaatcctattttgattaaataaatgattaaaaaatcaatttacgagaaagaactatttacacaaaagatttgacagtttcttattggacgaaagaaagaacttactaaattagagcaatttaattagcgtggctaaaagatattactacttaaacttcccacacgcaaaattgcttgtttcattgtgattctgcgtgttttgacaaatataaaaggcacaagtccttttcattgctataattatattgaccaaaacataatttatttgcatgaaaggcttgtgccaatgtctattttaccatctcctgaccaacaaaatgaacaactattttcaaactcaatcatcagcttcatcaagaagtttcaggtgatcaagctgttgagaaaatgtggcttccgcaaggaaaaaggcattagcctgttcagcttgtttctttacgttttaagcaatgtctttcgtgaccgcagcttatatatgcagctgaaaatggatcattttcaagaaaatttttccaagaactcatattaccgttttatgcgcaacgttcacgtcaattggctccacttcaccacacttctgtctgcgcaaatcattaataaccacttgcgatctttgacttcagaaaaacgggctgattgctttgttgtcgatgattcctacttctctaggaccggcttcaagaaaacagaattagtcgcccaagtttttgaccatgtatcaatgacttacaagaaaggttttcgcatgatgaccctgggctggactgatggagcttctttcatgccaatcaattcagtgctgctgtcttctcagaagctacagaatatgattggcgaaaataaagtttttgatcagcgcaccattgctggccaaagacgtatgcttgcccggactaaaggcacagacgtgatggttaatttaatcgaccaagctatgaaagcaggtcatcaagccaagtacgtgctgtttgacagctggttctcaaatccacatcaaatcgtccagctcaagcaaaggaagctggatgtgattgccatggttaaggttagctccaaaatcaaatatgaatttgagggagaacgcaaaaacatcaaacagatttatcgcagctgtaaaaagcgatgcggccgttctcgctacctgctgtcaatcccagtcaaagtcggacgccaggacaaagacggtgctaaaatagatgcacggattgtctgcgttagaaaccgtgccaatcgcaaggattggctggcaatcatttgtaccgacatgtcgcttagcgaagatgaaattatccgcaactacggcaagcgttgggatattgaggtttttttcaaaacttgcaaaagttatctaaaactaagtacggaatatcatggcctgtcttacgatgctttgaccgctcatgttgccatagtttttactcgctacatgcttatgtcagttgccaagcgggacgatgaagatgaacgcacgctaggcgagctgttctattgcatgattgatgagctggcggacattacttttagccattccttgcaattgattactgatgcaatgctggccagcgtaaagcaagtctttcatgccagtgaagcacaaatagctgaattcacggctgactttatcaatcgtttacccaaatacatgcaaaaattgttaaagaaaactagcaaaaataatatagaagcctaaagccaagcaagatcaagagattactggcttatttagtgtgggaagtttaagtaaatataatttattcaagacatcataaagagcatttacatgaagttgacagtatattcgaccatctttacctcgaaaaatattttctgattcgggattaaaaggttgatcaaaatcagagccatcaatcgcaacaactaagtattgattatctaataattgcagtacattatttgcccggctaagttctaacataatttctttaaagcattcaggctttaatttagccttttgttgttcaaaagccgaagcagtcattctagaatttatgtcaggaaaagcatgaaaaatttccgaattcaggctgccagctcccatgttaagaattaacttaatcaaatcagtggaattgagcttacgacagcgagtaaaagcttgatcagatacagagaaatcgtgaatgttgtcagcgattttattgataatactatccatcagctttaaaatatttgagtgaagggatttcataagaggcacagctttctatgaaagaccagataatatgacgaaagtgagcagaaaggcaaataaactctgctcactttttattttaaaaagaaaaaagaccgaatcaaaatgattcgatctttaaaagctgtcgatataatgtcaatgtcttaacttaatgacattgacttttcgtcttcgctttctttaatattcaaattttgggaattagactaacttctttctgatccaaccagaaatccagtcgatgatcaccaccataatgatgatccctagcaaaatgataccaacacggtcccattgacgatattgcaaagcaataatcaatggataaccgataccaccggcacctaccaaaccaaggatagatgcggaacgaatggaaacatcaaaacgatacaaggtgttagaaatcaaagctggcatcaagttaggcatagttgaaaacatgattacgtggaacttagaaccaccggctgcaataacagcttcgtttggcccttcttccaagttttcaatagcttccgagaacaacttggcaagcataccaactgagtggaaacctaatgccaaaacaccggctgcagaaccaggacccacggccttgatgaacatcaaagcaagaacaatttcagggaatgaacggataattgccaaaacaattttaccgattcttgaagtgtaccaatgcttgtgcttggtgtgagctgcccagaaggcaaatggcaatgaaataattgcggaaatgaatgtacctaagaaagcgatacaaatggtttgccacaattgtgagaccaagtcttcacctgagccattgtaaacatagctccagtcaggatggaaaatacctgagaagattgcaccggcaatttgaccagcagtggctttaataccaccgaagttaataccagtacatgaccaaacaataattacgatagtggcaattgcaattagccaatgtgcaacttgtttcttacggtcaacgggtttagcgggtaattttttcattgtagtatccattatttcattaactcctcccgtgacttagatgaaacgtagtcgatcaagacaacaactacgataataacgatgatgatcgtaccagtttgagcgtaattgaagacctgcaaagtttgttgcaagttcaaaccaataccaccggcaccgatataaccaaggactgttgatgctctgacgttgatttcaaatgcatatagaacatatgaaatgaagtaagtgataatttgtggcataactgcgtaatggataatttgcaatttgtttgcacctacggcagtcaaagcttcaattggacctggatcaattgtttcgattgcttcgtagaacaacttaacaaccacaccaaaggtgaagactgctaaagccaagataccagcaactggaccgatacctacgatagctacgaagatcgcaccaagaagcaagtcaggaatggttctgacaatgttcatgatcacacgaagaatgccagtcacagccttgttcttaacgatgttacgggcaatcaataatgagtagataaatgcgacaacagatccaattaccgtacccaagacagccatcttgatggtttcaatcaacttaggccaaacaacgttcaagtagctccaatctggatgagacatttgaataaagatgtcagcaaattggttccagttttcaaacaagacactaatgtgcgtgttagtaacattgattgaaataaatagtcctgcaatcatgatgattgtccaaaccaagttcattactttgaacttacgcttaggcaattgatttacttgttcaggcattattcatcctcctcgctgccgttaccaccattgtaaatattagtgaagacagacttaggagtatctttcatcttgccatcgtaaactacttgaccagcacggataccgattactctttcaccaaattgttgtgcaagttcgatactgtgcaagttagcaactacggtcatgccgtatttttcattaagcatcttcaagtcattcatgactctcactgaagtctgtggatcaagtgatgcagttggttcatcagccaagatgatctttggattttgcataagcacacgtgcaatagctacacgttgttgttgaccacctgataactcgtcagcacgtgcataaactttatcggccaaatcaacttgttgtaaagcttcataagccttttgtttatcttctttactgaataagttaaaagtagtcttccaagttgggtagtaagctacgcggcctaccaaaacattgcgcaaaacactagaacgcttaaccaagttaaagttctggaaaatcattccgatatcgcgacgtaatttacgcaaattcttgcctttagcacttgtaattgatttgccgtcaatcaaaatatcgcctgaagtaatatcatgcaaatgattgattgaacgtagcaaagttgacttaccagcaccagacaaaccaacaactactacgaattcacctttattaatagttaagttgatgccctttaaacctacagtaccattgtcgtagatcttggaaacatcttttaattgaatcattggcttatctgccatttaatcgtcaaactcccttaattaaatttattatttcttagttgattcaacgatcttgtcgtatttacggataacgttgaagtcactatcttttgcgtatgcgtaaccttcgtggctatatacgctttcgataactttcttaccttcctttgacttagctacagagatgaatgccttagcaagcttcttacggaatgacttagacatacttggaattactgagatagtgtcgttaggaattggcttagtaaagtaaattggaacaacttgactcatgatctttgggttgtccttcttaacgatgttacgtgcatcttcaaagacgaaggctgcatcagtatcgccgtttaatacgttcaaaacagcttggtcgtgaccagtaacagtaactaacttacaactcttagttacgtccaaacccttttgcttaagttcagcaactgggaatacgtatccagcagatgaagttgggttttgtactgaaattgacttaccctttaagtctttccagttcttgatctttgaacccttcttaacaaggatttctgcacgatagctctttactaattggttagttgctttaccacctggttgcttaacaccgtaacgttcagcttgcaaaagcaaatcggctgcgccttgcttgtgagctaaaacataaccatctggtggaagaaaacctacatcaactttctttgatttcatagcttccacaacggtgttgtagtcagttgacatagaaacgtgaactgggatacccaatctctttgaaagcatcttttcaagaggctttgcacgagcttgcaacttagttgcagcttgacttggtacaaattgaatagttaatgactttggggtataaccacccttagaactattactcttgtttgaacacgcagttgcaactactgctacaagaagtgcaactactgctaccaagattcttctaaatcttttcattatgtcctccataaacataaatacacagtgataaaacaaactactctacatcacaaaaaaagacttaattacgggtcgccaaaggcgatcaataattaagcctaattaatgacgtttctaataactaaacgaacagaaaaaacgtctttacgagcgaaagacacatcctttgcaataaattgttctgattgcataaacattatctttcactcccctttttcgttcccacgttcatttgataaaataataccagaaacattcgtgttctatcaaggtattttgcaacttttttcaaaaaaataatcgccaatgaatttagaatcatttggcgattattcttatattagttctttttcatagttggcttaagaggattgtttcccatatcggttttaacaatcaaaacatcagctaaagcatgttggtttacgtattcagtaactgaacccatcaacattctttcaactgcattcaaaccagtagcacccatcacaattaaagtattgtggtggtccttaatgaagtcgtaagaaataatgcgcttaggactgccataacgaatgtgataatcaacatcgtcaaaaccgaagttatcgtgagcccatttcttcaaactcttcaagtattcttcagaatcttgaagagtttggtaaatggtatctcctgaaatcaaagtgtcttgcatttcacccataaattgacgcgtatcgattacgttcaatacatcaacatgagcaccatcacgcaaaccaacttttacagccttgtcaaaggctctttcagctgattctgagccatcaactggaactaaaatgctttcttttgttttatctgtcacgttaattcatctcctataaattgcactagtacttaccctttattttagcataattttgaaagccgttactttttaattgattgtttgcttgaagatttgttgctaaaataatattcatgacattcattaacagaaaggggagaatttttttgactaaaaaattaactaatcaattaatcggagtaactagtggacgcaacttccgtgaacttggaggctacgaaactatgtctggcaagaaaatcaagatgcacaagttattaagaactggtaacttagccgatctttcaccattcgacaagcagtttttgactgattacggcgttaaatacgatgtcgacttccgtagtaaagaagaagttgataatcaaccagaccgtgtcccagacggcgtagaatacatttacgatcctgttttcagtgaagacttaaccaattcatccaagagtttaactgacttagatacacaagcacacgacgacgctgattttggcttcaatcacatgcattatgcttacgaagacatgatcgaaagtgaacctgcacaaaaggcatatcgcaagttcttcgatgtcttgcttgaaaatacggtggatggcgaaagtgttattttccactgtactgcaggcaaggatagaaccggcttcggtgcattacttgcattatctgctcttggcgtaccactaaatacgattaagaaagactatcttttaaccaacatcactaccaaggatttcgtcgacagtatggttgaacatgcccgtcaaaatggtaaaaatgaaaatgtgctgcaatcgattcgtgacattcagagtgtccgcagtgaataccttgaccatgctgttaaagtactaaacgatgaatatggcggtattaataactacctacgcgatgtaatgaagctctcaagtgcagacatcatgaagttgcgtaatatttatcttgaagattagaaaaagaaggctaaaaactagtcttcttttttcttaccaaatttttgctctaaaaaggcataaatcgcgctaggatcagtaaaattaaaaacttcgcgcaattcgttggctggcgtattagccaaaaaatccatcacttgagctaataatgcagcttgcccatctgggtcattatctaaaagcatgaataaaaatttaacttcaattgcttggctaggattaatcatattatgaaaagtgactggcgttttcagcgcaaccggaacaatcagtctcgtgttaacaaactcgccctcggtgtgtggaatcgcaatattaggaatatttttacctagtgttgcagtatccaatcccgttggaaaattatgctctctttcgacaatatggtgtaaaaagtttcccttaacatagccactttcgcgtaaatgctcgtaaacttctttaaaaaccaaatcttgcttagtttgattagaaataaatactgcatcaggtgcaaaaagattttgattagtcattggatttttccttactaatgtggaattaacattttcaccataagttaacaagacgtttttttcaacccaaaagatggtaaagttaaggtaaatcatttttaaagggagaaaaatatggcaaagacaaaaactttatactttggtgccggttggttcaacgaaaagcaaaataaggcttacaaagaagcaatggaagctctaaagcaaaatcctaccgttgacttagaaaacagctacgtacctcttgataatcaatataagggtatccgcgttgatgaacaccctgaatacttgcacgacattgaatgggcatcagctacctaccataacgacttagtagggattaagtccagcgacatcatgcttggcgtttacttgcctgaagaagaagatgttggtctgggaatggaacttggctatgccctttcaaaaggcaagtacatcttgttggtaattcctgatggagattacggtaagccaatcaacttaatgagctggggtgtttgcgataacgcaattaagatcagtgaattaaaagacttcgacttcaaccgccctcgttacaacttctacgacggcgcagtttattaaataaattaagcagacatactaatatagctaagcataactaaaacgacatcgctaattatctagcggtgccgtttcttttttcagattacctaaattcatcaaaaaagattccaagaaccttttctaacttttaatcctcaattctttctctaccttttgatctttgttctaatggatcatatcccaaatcttcaatctgcaatcttttttctttagcagacatttttgatacttcgtcccaaaaattagttttttcttttttcatttcaagattgccattaggctttagaattaacacaacattatcgccttttttaaacaccagtacttactccgatcacaacagataaaaataataggaaaaatgatattacatttcatcaaaactaatcaacttgcaccccacttgttctgccagttccgtacatgaatccgtaaagcctgactttgaaaacaagtagtaacttaaacttcccacactaaataagccagtaatctcttgatcttgcttggctttaggcttctatattatttttgctagttttctttaacaatttttgcatgtatttgggtaaacgattgataaagtcagccgtgaattcagctatttgtgcttcactggcatgaaagacttgctttacgctggccagcattgcatcagtaatcaattgcaaggaatggctaaaagtaatgtccgccagctcatcaatcatgcaatagaacagctcgcctagcgtgcgttcatcttcatcgtcccgcttggcaactgacataagcatgtagcgagtaaaaactatggcaacatgagcggtcaaagcatcgtaagacaggccatgatattccgtacttagttttagataacttttgcaagttttgaaaaaaacctcaatatcccaacgcttgccgtagttgcggataatttcatcttcgctaagcgacatgtcggtacaaatgattgccagccaatccttgcgattggcacggtttctaacgcagacaatccgtgcatctattttagcaccgtctttgtcctggcgtccgactttgactgggattgacagcaggtagcgagaacggccgcatcgctttttacagctgcgataaatctgtttgatgtttttgcgttctccctcaaattcatatttgattttggagctaaccttaaccatggcaatcacatccagcttcctttgcttgagctggacgatttgatgtggatttgagaaccagctgtcaaacagcacgtacttggcttgatgacctgctttcatagcttggtcgattaaattaaccatcacgtctgtgcctttagtccgggcaagcatacgtctttggccagcaatggtgcgctgatcaaaaactttattttcgccaatcatattctgtagcttctgagaagacagcagcactgaattgattggcatgaaagaagctccatcagtccagcccagggtcatcatgcgaaaacctttcttgtaagtcattgatacatggtcaaaaactttggcgactaattctgttttcttgaagccggtcctagagaagtaggaatcatcgacaacaaagcaatcagcccgtttttctgaagtcaaagatcgcaagtggttattaatgatttgcgcagacagaagtgtggtgaagtggagccaattgacgtgaacgttgcgcataaaacggtaatatgagttcttggaaaaattttcttgaaaatgatccattttcagctgcatatataagctgcggtcacgaaagacattgcttaaaacgtaaagaaacaagctgaacaggctaatgcctttttccttgcggaagccacattttctcaacagcttgatcacctgaaacttcttgatgaagctgatgattgagtttgaaaatagttgttcattttgttggtcaggagatggtaaaatagacattggcacaagcctttcatgcaaataaattatgttttggtcaatataattatagcaatgaaaaggacttgtgccttttatatttgtcaaaacacgcagaatcacaatgaaacaagcaattttgcgtgtgggaagtttaagtatttagacatggttatccaacccagacaaaaaatggatgaacgtgaggcagccttaactatgttaaagaaattagcccaacaagaaaaagatttcttagtcctgatggatcgtggctatattagctttaatttaattgaaaattgcaatcgattaaaacattgccactatgttatgcgatcaaaatccggagatggtgcttttaaagaaattgtagctatgtcgaatcatgaatacgatattgacttatcatgcagagtaacttcgtcacattattattatgtcacccataaagatacagaaaagtttcttcacctgattcttcacaaaaagcatcactataaagctgttcgttcaaaaaataccagagatcaacgctgggattttgaggatatgtgtgatgttagatttagagtttgtaagtttagaatcaatccaccaggttcagacgatgagtgggaagtcctcatcaccaatttatatcgaaatgaatatcctctagctagaatgaaagagatctatcatcttcgctggggaatagaaacttcttttagggagcttaaatatgacttaagcggcatacagtttcattctaaaaaagatcaatttgtttatatggaaatatacgcccattttgcaatgtataatgccgtgagtttatcaataattgcgagctcaaaaccgtatactcagggaaaatatcaatatcaaatagattttaaaatggcctgttgtatctggcgacgatattttagtataagtgataattcagataaaaacttcacacaattactgctggatgtggcattttatttaacgcctattcgaccaggaagaaaagataaacgaaatctaaaagttaaattagtagttggctttccttatcgtctagcagcttgaactaatttaaacgactatcttaagatggcttatttgtgctatcaaaaaagacatttatcgaataaaataattcgataaatgtctcaaaaagtgtcatcagattagtcaatgtcttaacttaatgacattggacgaaaagtccccgcttttttgttagccgtgaaatttaaattggcattgattaagatgatcattaattaatccgattccctgcaagtaggaataaatgactacaggtcccacaaaggaaaaaccatcttttttcatttgtttggatatcttctgcgataggtcattagaagcgggaacgtcatcaaagctggcaatatcatgcacaattggagtaggtacaaaattttgtaaatatttggcgactgaacaatatttttgttcaattgccaaaaatgcccgagcatttttaacagcagcattaattttcattcgattacggataatgcccttgttttgcattaatgactcgatatctttatcggtcatctttgcgacttcagagatctgccaatttttgaatgcagctttaaaattgttgcgtttatgcaaaactgtggaccagcttaaacctgattggaaaagttcgagcacaagcatttcatacaaatgtgactcatctagattaagtttgcaccattcatgatcgtgatactcctgtactgcttcgtcttttgtatcgccccatggacagcgaataatttcttgattcatatttttctctctttctatgtaagtaatgttttacccctctattatttattacgcaaaaaaatgcgattattttttgagaaattatatttttatgtgcgaaataagggttttaacagctttttttgctataattaggtgtgaatttcgaggaggatcctatggaaaaattagataccatgatgttggctgatgatttagccttatcacaagataaaattttaaatggcgaacaagactttggcgctgaagctgtttacaaagtaatcgataacttgggcgttttaaataacccaatcaaggattacttcgacatgactgaagaacaatattatgaagctgaaagcgatcacaaactaactttgatcaagatggacagtaagttgactgatttgcatgatcgcattttaactaaccatgttgatggttttgttgataaggacgagatcaacttgacctacaatcatgagaatccatatgaagatgatttatacgatccaactactgattatcgtgaaattgtttacagcttgaaagttattggtgcggttcaagcaattgcagctaaggacttgcaagaagtattgtctaaagatgctgtattatcaattggacttgccgcatatgctttagcacacaacgcataaattatttgagtcggctggtaagcggccggcttttttgaggcgaaaagatgaatttgtttaaacacataaagggaatagttgatcgaatcgttggcgccaaaaaacgctctgcaatggataaagatagtgaattgcttgatccgatgcaaaaatatactactgttggagaatatcatgttggtgccgttgatggtacgccgcatggtaaggactatgttttaaccgtttatcaagacgaagacggcgttttgcgacaagcacttagtccagagagtacaacgaaattagcaccggaatatttacgcaagtataatgcggaactaggtcattttcgtgcctttcataataagaagacagggcgccgttattgggtggaaaattacttggataatttcactacggaagtgaaaaagcatattcgcccaggcactaattcggtcaatatcggtgtaattacagatactcactttaaagataaagatagcagcgatttttatggctttaatgggctgcaacatgtgcaagaattttcttatttagatcaatctggcttgctagatttaaaagtccacttaggtgactggatcgatggctccgatgctggcctggtcagtgaaagtgaattggtcaagctgaacaagtcttttaagtcggatcaggtgccatatttgagtatcaagggtaatcatgatgaaaatgataagtttgatgaacatcatgatttaaaagcctcatttccagaaaatgaattcgaaaatattatgtggcccgatatgtaccggcaacgaggaattcattatgtttcgcgccagcacggggtggcatactttgatttagatgacgtgcgggtgatttcagttaatacgtcagatgttccatatgaattaaataaccgcgggcaaaagcgctatgacaataagattgtattggctgtgcgtgaagatcaaattgaggaaattatcgaaattttggctaattcttccaacaaaaagatcatcttcatgtcccatgccaacccaattaatcgaaaggggtctaatgcacttaagtataatggccgctctttgcatgaactgctagttgcctttaatcaacgtgaaaaaggtcgaatgcacgctagcaatggtgttccaacagaatttcgtttatcaaatgattttgattttaccaatatcaagaatgcgagaattattgcctacttctgcggacatcggcatcgtgaagaccagtatcggatcaacgggattcaatatattttgtttaactgttctgccttgatggggccaaatcattcgctaacaactaaatacaacaaaaacttagaccgaagaattgatcaaaataatgaatttgcgggttatattgtgaacgtcgatttaaaacgacaccgcattcaatcctttggctatggtgcagcttctagacgccgggtgtatttcatttagttaaggaatagtaaaggtatttggctattacaagtgtttagcttataataaaaaggttaaagtaaaaaatagtgaatattatagcaaatattaagatttagagaattgacttaggggaatttaaattatgtgcggaattgtcgcgttttatgatccaaagataaatgaaaagcaggctgtcattggcaaaatgatggccacgattaaacaccgcggacctagttccgacgggtattatactaatgacgaggttgcccttggttttagaagattatcaattattgatcttcgtgggggtagccaacctatttataatgaagataaaactagagcaattatttttaatggtgaaatttataactttaagccattaagagaagaattaattaaagcaggccatgattttactactaaggctgatacagaagtcttacttcatggttatgaagaatggggcatggatggcttgcttaagcgtgtacgtgggatgttcgccttcttaatttgggatgacaacaacaagaccctttatggtgcacgtgacttctttggcattaagccaatgtactacagtaatcaaaatggccatttgttggttggttcagaattaaagagctttttggaatttccaaagttcaagcgggaattaaatgttgaagcagttaagccatacttgatgaatcaatacaatgacctagaagaaaccttctttaagggcgtttaccgcttcccagcgggccattggtttgaatacaaagatggtgaaatgaagacccatcaatattgggatgctgaatataaagaaaatagcctttcctttgaagaaactttgcaaaagatcaacgaagatttgaaagaaacggttgatttgtatagaaacgctgatgttaaggttggtgctttcttatcagaaggaatcgactcttcatacttgactagtttgcttaacccagatgacgttttctcagtaagttttgatgattcaacttatgatgaagcttctaaggctaaggcattagcagatattaatcactggaagttcttcagcgataaggttgatgctgatgaagcaatgcgtgacttcccagaaatgcaataccacatggatgaaccagatgctaatccgtcaatcattccactctggtacttgtgtaaactagctcgtaagcatgttactgttgctctttcaggtgaaggcgctgatgaattgtttgctggttatgtgaactacgggatgcatacgcataacgacattattaaggtctttacttcagaattgaaaaagttgcctgagaagaagcgggttaaattggcacacaagattaagagaatgcctaatttcccaggtaaagttcacatgtacaccaatttagctgaaccgagtgaattttatgtcggtcaatcggttatctatgacatggattacccaactatctttacttctaaagatgctaatagcattttacagccaacgtatcgcaataaattgactgttaacggcatttaccaaaaagactttaagaaagtaaagggagtcgataatgttaagcagatgcaatacattgacttgcaccactttatgcttaacgatattgaacaaaaagctgataagatttcgatggcccattcacttgaagttcgtgttccttacctcgacaagaagattgcggaattggctaactctatcccaaccaagtacttggttaaccgtcatgataccaagtatgctttgcgtaaggcttcagaaaaagttttaccagatgagtgggctaagagacctaagcttggcttcccaactccaattaagcaatggttgaaggaaccacgtttttacaaacaagttcatgctctttttgaagaagaatttgtcaacgatatttttgaccaaaagaagattatcaagttacttgacgacaactatgaaggtgatggctcacatagacgtcaaatctgggctatctataccttccttgtttggtacaagttgttctttgttgattacgaaaacacagttaagaaatatcaacacgtgcaacctgaagttgctaagctaatttcacagggtaaattactataattctagggagattttttgaggatgagtaaaaaatttacgccgatcttactcggtagtgatatcaacgtgtatggtatggcacgttcatttaatgaagcatatggcattaaagtgaaggccttagctgacgttcaacttgctgctactcgttattcaagcattgtggacgttgaattgcatcatggctttagtagcgatcctacttttatggacgtgatgcacaaaaagatggaagaatacaagaatcacgaggagccagttatcttgattgcttgtggtgatggctatgctgagttgctttctaagcaccaagatgaattgaaaaaggtctttatcgttccttacataaaatatgacttacttgaaaaattaatctctaaggaaggcttttatgaaattgcggaagaatatggcttgccttatcctaagactaagatcattacgatggatgactacaagtcaggtaagtacgaggatgtcccatttgatttcccagtggaattaaagccggaagatccagtttcatggttgaagtgtcaatttgaaggtcggaagaagacttttgccattcaagataaggctgaatttaaggatatcgtaactaagatttatactcatggctacaacgctgaccttattttgcaagactttattcctggtgatgattctaacatgcggaccttgaatgcttatgttgataagaaccaccaagtaaaaatgatgtgtttagggcacccattattggaagacccaaccccacaatcaattggtaattacatggcgattttgcctgagtacaatgaaaaattgtacgaagaagtacaacaattccttgaaaagttgaactacactggtatggccaactttgatatcaaatatgatccacgtgatggtgaattcaagttcttcgaaatcaacttacgtcagggacgttctagcttctacgtaactttgaacggttacaacttggctaaatggtacattgatgactatgttgaagatgccttgaaagataaggaaacagtttatggtaataagcttgaatctaaatacaagctttggttaggcgtgcctaagaagatattcaataattatgcttatgacaacgactataagacgactgctgacgaacttattcgtgagggccgctatggtactactgtcttttatgacaaggatagaaacttcaagcgctggttattgatgaagtacatgttccataactacttcaaacgttacaagacttactatgaagttaataagggtaagatctttgacgaagaaaataaaaaattaaacaaatagtttaaattgagaggtaaaaaatgcctctctttttttctaaaaaattttagctgaatcatttcccaatttaatggtcttttggttaatacaagatatattcatctatatttgaacacaatacaagatgttgtgttttatgctatgataaagacacgagatttggagtgattgaaatgctaaaagaagaatttaaccaacaaaatgtaacaaaatttaatacgcctaaaacttttgttaaacgtgatgggtcaaagtatccgttcgcaatttttaaactcaacatggttttgcataacctagatttagataatgtagcacctgctgtaattgaaaaaattgtggctaaactagatgctgctgatgaagtaaatgcacaagatgtagcagttgcttttagagatagcctaaatgagttgggttatttggatgaagctaaagcttatgtgcaataccgcaagcacgatgaagaggaatggattaaacaaaccgatactcgtgcacggttaaagcgaatggttaatggtgacccaacgattgttaacgagaatgccaacaaagatagtgaggtcttcagtactcaacgtgatttaactgccgggaccgttggtaaaacagttggtttgaccatgatgcctgagcacattgctaaagcccacttgcgcggtgatattcactggcatgacttggattacacaccactttcaccaatgactaactgctgtttgattgactttaaggatatgctaactaatggtttcaagattggaaatgcctatatgactagtcctaactcaatcaatgtggctacacatcaagttacgcaaattattactaatgtagcttctagtcaatatggtggctgttcttttgatcgagctgatgaagtgttagctccttttgcagagaaaaactaccaaaagcatttaaaggatgctggcaagttcattgatgatcctgaaaagctggaagaatatgctaagagtcaaactaagaaggacatttacgatgccatgcaaggcttggaatatgagattaataccatgttctctagccaagggcaaacgccatttactactttaggttttggtttaggtacttcttggattgaaaaagaaattcaaaaagatatcttgcgtatcagaattaaaggattgggtagagaacgcagaaccgcaattttccctaaattagttttcaccattaagaagggcttgaacttacatccaggggaccctaactacgatgttaaacaactggctattcaatgttcaactaagcggatgtatccagacgttttaatgtatgatacgatcaagaaaattacaggttctttcaaggttccaatgggctgtcgttcattcttacaaggctggaaggatgaaaatggtaaggaagttaactcgggcagaatgaacttgggtgttgtaactgttaacttgccaagaattgccatggagagtcatggcgataagaagttattctgggaaatcttcaatactagaatgcggacttgccaccaagctttagcctttaagggtagacgtgcaattcaagctaagcccgaaaatgcgccaattatgtatcaatatggcgtctttggtaaacgacttaagccaggtgatgatgttaacgagcttttcaaaaatggtcgagctacgatttcgttaggctacatcggtttgtacgaagtagggacagtcttttatggccctgattgggaacacaatgaagaagcacatgattttacaattgagatcgtgaagaaaatgcatgacttgtgtgctaagtgggaaaaagaggacccatatcattggcattacagtttgtactcaactcctagtgaaagtctaactgatcgcttctgccggctcgatacggcaaagtttggcaaggtgaaggacatcactgataaggaatactacactaattcgttccactatgatgttcgtaagcacccaaccccatttgaaaagttgacttttgaagcaccatatccatattatgctgcaggtggttttatccattattgtgagtaccctaacttgaagcaaaatccagcagcccttgaggcagtttgggattgggcttatgacaaggtaggctatctaggaactaatacgccaattgataaatgttataagtgcggttttgctggtgaattcaagtctactgccaagggttttgaatgtcctaagtgtggtaatcatgatcctgctacttgtgattgtgtcaagcgaacttgtggctacttgggcaacccattgaagcggccaatggttcacggtcgtcatgaagaaatcgtgcaccgggttaagcatatggactttggcatggaagatagtttagctaccgaagaagaagtaaaaaaaggtgagtactaatgcctgaaaaagataaaaacactcaagaaggaccagatatccggagtaatttgatcaaggttaatatgggtggggataccatgtttgtggatcctgaccaatataagccacagttagatcaccaacgtgagttaaaaagaatgcaccgcaagccgaaaaatccaaaaccacaagagtggaagactgaggattattctaaacataaaattgcggattataagccatttaactttgttgatggtgaaggcgttagatgtagtctttatgtttcaggctgtttgttcgattgccctggttgctataatttagcagcccaaaactttaattatggttttccatatacgcaagaattggaagaccgcattattaaagacttgggccagccatacgtgcagggattaaccttactaggcggagagccattcttgaatacttgggtttgtttaagaattattaaccgaattcgaaaagaatttggccacagtaaggacatctggtcctggtctggatatacttgggatgaattgcaaaaagaaacacctgataaaaaggaaatgttgtctaagatagatattctagttgatggccgctttatgaatgatttaaaggatttaaccctgcaattcagaggttctagtaaccaacgaattattgatgtgccaaagtcgatgaaggcaggcaaggttgtcatctgggataaattgcaaaaataagataaactaaagtccggaatgattttctggacttttttgctaggtgaaaaaatggaagaaaaaaatattaaacaagttgatcaaatcatgacggccttgacccaagtgattgatccagaattacaagttgatgtagtaaatcttggtctgatttatggcatcgatatcgaaggagataaggcaaccattaagatgactttaacaattatgggttgccctttatctgattatttggaacaacatattcaaaaagctgttctttcagttgctggaattaagtcttgtgacattaagctggtctggtatcccgtctggacgacagagcgtctttctagtgcagctaaaaagcaattaggtgtaactaaccatgatgatcaaattaagcaggagaaagccaccaaagagaagattatcgacttttcagtaccgatcaagaaaatggcagatgaataccctgactttgttcaaattatgtacgattgtggttttactagaattaaaattcctggattgcttaaaacggtggggcgtgtgatgaccattccattgggagctcaggcaatgaaacttgatttggctaaagtgaaaaaagcatttgaagataaaggatacaaggtaatcaatgactgataaaaaaagacaggacgcaatcctgaaaattttgcattatattcaaaacggcggcgattttgcgaccgcaaagaagatgtttcaagaagaattcgatcaggttgatgtggccgaaattacagcggcagagcgcgaattaatcaagcaggggttaaacccagcagagattcaatacctgtgtaatgtgcatgccgatgtctttaagggtaatatcaaggagaatgcggtaaatcctgattttgctactccggggcacccggtgcatacgattaagctggaaaatatggtactgaaatcattggttaatgacgcactcttgccagatttgaaaaagtatcaagcaggtcaagatacactggataaaatcagaaaagaattgagtgatttggcaacaatcgataagcattaccgacgtaaggagacctcgctttttccattaatgaataaatatggcattacagctccgcccgaagtgatgtggggcgttgatgatgatattcgcgatttaattggggatgcaagcaagattgctggtgaggagcatccagataaagatcagttggctgaggcaattaaaaaggcgagtcatgaagtgcttgagatgatctttaaagaggagagcattatgattccgatgattgacgaggtagctgatcaagatgattggtacaacgttaaacgcgaagagagtcagattggctataccctgattcgcaagccaatgaattggaagccaaaggaagctaaaaaagaagcagggcctatttctgttagcaatctttcatccttcctcattaattttgaagaaggaaggttaaatttagagcagttaaatgcaattttggatatgttgccatttgcattgacctttattgatgaacacgataaggtagcttattttggcggcggtgctgagatttatccgcactcgcgcaatgctattggcaatgacgtattctcgtgtcatactgctaaaagtagaccgttaattaaaaagatttttgcgcaatttcattcaggtgaagttgacaagtatgagtttcactttactccacacaagatgaagcgctgcttatacctacgctattatgcagtacgtgataaaaatggaaagtatctgggttgtcttgaggtagcacaagatgtgacagaaattagaagctggactgaagaaaagaaaaaaatttaacttgttgggctgtgttctagtaagggatgcagctttttcttttgccctcgtgcaaaaaatcacaattcttgctagactagattgagagaatgattaaaaagaagggaagagagaaaatgcgcacagcacatggaaaacaaccagctgatgaaatcaaattgcattggcttcttctaggccaattactaacgtggttgggttccagctttatttggccatttacttcagtttacctgcacgaccatcttggcgtttcactagctttagtgggtgtcgttttgctgttcaactgtgttgcaaatatgattgggtcatttatttcaggctggtgctatgaccatatggatccatatgtcttgctgattgtgggggctgctttagatgcggctgtcttgtttggcatggctttgaatcatagttggccgttatattggctctggatgactttaactggctttttgggtggctggaatggagcattgattaactcgattgctactagtattaaatctaagccaggtcgttatgtcttcaatatgatctactttgctcaaaatgttggggtcgtttgtgggacattagcagtaggttatctttatgattattcagtgactttattatttgtcattgctggtcttttattcgttggcgtttgcgttaacgcaattattaattatcggccaatgattcagttccacaaggagcgtttggctaacaaaggcgaatcaaagaagaaggcctttgagccgatgccaaaatacaatctgattatgtcaattggcttttttgttacgatcgctgtaatttggttgatgtacatgaactgggaatcaaacttgtctgtctacatggtttctttgggcattccttttcatctgtatagtttgttatggaccatcaatgccggaattattgtcatcgtgcaagctatcttaagtcgttttactatctttaagagcttatttagacaaattttatttggcactttgatgtttgcaatttcttttgttactttgatttttgccaaagattttgcacatttcgccttatccatggttatcttaactttaggcgaagcaaccgcaatgccgtcgattccaacttatgtcaatgatctgtcgcccgattctagtaagggcaagtatcaaggcttaaccttgtctgcatcgtcaattggtcgagctctaggtccattatttggtggtttaatcattgaagatttcggctatattcaattctttgctgttgctgcaattggtatctttttgcttttagtcatgcttattccaatgcatgcgaaactacagaaaaaactaaaattatttgtaaaataaaaacaacctgaattgtcaaattaagtgcaacagttaggttatgaagagatatattgcttgaagagttcctctgctgtgtgatattggaggattcggcgatatttgtggttaatggcatcagttgcctgttgaacataagcttttgacttgtctttcatgctcttgcccttagggaagaattgacgcaaaagaccattgcagttctcattggtgcccctttcccatggagaatatgggtgagcaaagtaaatctggcagcccttgatcttggtcatatccgcaaactcagagccattgtcaaacgtgattgatttaaaccaggcaggatgtctgtcaatctccttttgaagcagcctttggcatgtgcttgcccgatagtcaggaatcttgataactacttcaaagcgtgtggttctttcagtcaaagtcattaaagcaggctgattcttgcgtctgacgcctttaaccagatctccttcccagtgcagcggagcttttctgtcttcaacctccttaggacgctgttcaatggaattgccaagatgcttcttgtgcaaagcgtgaccgccatggctgtgatgacgcttgttcctgcgtcttttgagcttcataggcagatcaatattgcttatgtccagcaagccctgatcaatatagcgatagacggttggtgtgctgggacaagggtagcctggcatagtccttttgaattcaccaacgaactcatcgatgctggtggcatcaaatttagctttaaagcgtctggagagcattctcaaaaagacagcataatgcttcaatggattgcgctgatagcagtttttgcgacgcttctcataataaatctgtgcagtatcagcgtaatagtgctcatacaataaatagctgctgtctctttgcaggacgcttccgcgtttgatttcgcgactgattgtcgacttatggcagccaacttcttgagcgataacagtacgggaagttatgccggaatccagcattgcttgaatttgtccacgttgtacgctggttaattgatgatagtgcttagaaatgctagaatttgaattggtcatgaagatcttcctttcttgatttttcgtcacttcaagtttaggtcttcatggcctttttgtttaacacttagtgttgcacttcaattttaaatccgggaaaataaaaacaacatgatagcgttaatttttttataatgctatcatgtctttatatgaaaaatttttccactagggaggtaatttaatgtattttaacgtacgcggcggtgctggtgacattactaaggctaatacttcagcgcgtctacaagataatttatatttggccgttaactcagaatggttggaaaaggctaaaattccatctgatcgttcaagaaccagttcatttgatgggatcgatcttaatattgaaaagaacttgatgcaagactttgcagattttgctgctggtaagaaggaactgcctactgtgcctaacttcaagaaggcagttgagctttacaaggttgctaaaaactttgacaagcgaaatgcggatggtgccgcacctattcaggcagatttgcacgaaattttagacttgcgcaacttcgctgactttaacttgaaggcagcagatttttacaagaatggttttgccgttccatttgctttcagtgttgaagcagatatgaagaatactaagattcactcattgaattttggtggtccaagtactttcttgccagatacgactacttacaagactccagctgctgagaagttattggatgttttgaaaaagcaatctattaagttgttaacaatggccggacttgatgaaaaggacgcagaagattacgctgacttggcaattaagtatgacgctaagattgctaaggttgttaagtcaactgaagaatgggcagattacccagcaacttataatccagtttcattgactgactttgaagcaaaattcgattccttcaagatggattacttcttgggcggattatttaccaagaagccagaacggataatttcaactgaaccacgttacttagatcacgcggaagaattgttgaatgaagaaaactttgctgaaattaaggcttggatgctggttaagtttattaatggcgtagcttacagcttgtcacaagatttccgtgaagctgcctttccatttagtcaagctttgtcaggccaacctgagctttcaagtggcgttaagcaggcatatcatattactaatggtgacttcggcgaagtagtaggtgtctactatggtcaaacttactttggcgcagaagctaaagcagacgtgactgatatgattcacaagatgcttgatgtttatgaaaagagaattcgtgaaaattcatggctttctcaagcaactaaggataaggcaatcgttaagttgcgcgctttgatcttgaagatcggttatccagacaagattgaagaaatctatgaccgtttacaagttgatccaactgctagcctttatgaaaatgaagtgcaatttggtcgggaacaaattaagtacaatcttgagaaattgtaccaagatgttgaccgtacggtatggttgatgccaggtgatatggttaatgcatgttacgacccacaaagaaatgatttaactttcccagctgcaattttgcaaaaaccattctatgacttgaaacaaagtcgtgctactaattatggtggaatcggcgttgttattgcacacgaagtatcacatgcctttgacaataacggtgctcaattcgatgagtttggtaacatgaagaattggtggactgatgaagattttgctgaattcaagaagagaacgcaagctgaaatcgacttgtttgatggtattgaatatggccctgtaaccttgaacggtaagcaaatcgtatcagaaaacattgccgatcaaggtggtttgactgctgctgttgaagctaacaagggtgaaggtggcgacaagaaggcaatgcaagaattgtttgaaaactttgctcgtgtttggacaactaagcaattgccagaatcaattaagacgcaagtatctatcgacgttcacgcaccaggtccagaacgtgctaacgtgcaatcacaatgccaagaagaattctataaggcatttgatgtgaccgaaaacgatggcatgtggcttgctcctgaaaagagagtagtaatttggtaagtaacttttcttaatatcgagtatgaaaaattagctaaattacatataagctcctataacaagaatgactacagtgctgctactacactgcagccctttataacttattacccattaataaattttttgcactaaaaagtgtctgggaaaaaactaagtctcagatcatgaaaaaagaacgttgaatttttgtttcaacgctctttttgtatacttttagctccagccttgatattattaaatcatcacaaaataaaaaaggtggaaactaacatgtacaagaattatatcacaggtcaaactgctttaacacttaatctagattttgccattccggccaatcatttggctaatgtcatcagctggtttgtagattcaattccagaagatgttttagtaggcaagactgctaaaacgggccgcccagcctatcatccagccatgatgctcaaaatactgctttttgcttactccagaagagttttttctggcagaaagattgagttgatgctggaagaaaatctgccaatgatgatcttggctgaccagcaaaagatttcatatcatactatcaataattttagatcaagcagccatgccaatgaactgattaaaaagagctttatctacttcactaacctgttagaagatgaaggcttaatcaatgaaggtgctgcttttatcgatggtactaagattgaagctgatgctaaccgctatacatttgtctggcgcaaagcggttgaaaagtatcatgaaaagctgaaaggccaggcagttgaactttatgatgaattgattactaaagaagtagtcaaagaaatggaaaaagaaaaagttcaaactagtcaggggctaaaggaattagctcaagaaactgaagcagaaattaacaagctgactaaagagattgagcaggaaaacaaagccattcctggcggttcacctcgaaaagccaagcgacgtggactaaaaaagattctgcaccggctaagaaaagattatgtgccaagaatgcaaaaatatgaagaagccgaagagatctttgccggacgcaacagttattccaaaacagatcatgacgccacctttatgcatatgaaggaagaccacatgaaaaatggtcaattaaagcctggctacaatattcaagcagtcacgaccgatcaatatgtagttgattatgccatctttcctaatccgacagatttcaaaactttggagccggttttggatcaaatgaccgtgttggacaagtttgacaaaatcgtcgccgatgctggctatggcagtgaatacaattattcgatgctggaggaaaaatatccagacaagaagtactttattccctacactatgtatgaaaaagaacagaccaaaaagtataagaatgatccaactaagctaatcaactggtactacaatgaaaaagatgattattacattgatcatcatggcgtcagattcaatttcaaatattacagccagcgcaaggatcgttctactggtcaggtccgtgattttaaggtttatgaggcagacgagttccagctaacgccagaattggaacaattggctaaaacagctagcggccgccagcgccaagttcgctataatcctaactggcaatatttaaaagaaaaagcaaaagaagttctccaaagcgaagaaggcagacacatctatggcatgagaaaatatgatgtagagccagttttcggacatttgaagaacgtatttggcatgcgcagaacgcacctgcgaggtaaagagaaggtcgaaaccgatatcggaattgcctttatgatgatgaatttgaacaaatattgtcaaagaaggtggctgaagggccgatttttattgttaaaaattttaaagagaacaaaaaaacgatcaagattcttaaaaaaggaaatcttgatcgtttttattcatctggaagctagttttttcccagacactttttagtttagtaattatttagttttagctgtcgagtaatcctttggcttaatccgcttaatgtaagatggatttggtcgacccaggattaatggtacacgctcgattacggtatcggcgtattctaagccgaaccaggaagctgggttagaagacaagttttgcaagcgaacccgcgcttccacaagccatttttcatagccaaccaattgtgtttgtggactgatgacgtcgttaacaataacgaatgagaagtcacctacgtcacgacctgggctggtggtgtattcctgtggttgtggctcaatcgtaccgtcggcgatcaagtcatgaacgatctgacgaatgtagacattcacactagtttgcttcttaaagccgaggtagagctgaatgttaattacgttcttcgtaccgtaagtgttaacagcatattcagcggtaaatggctcgttagtaacattgacagtgacaaaccagtaagcctttgctcgtttaggtcttttatccaaaattgagtacaggatttcacgtttgatgaacttattgtacttaacgttggccatgtaaaccaagttggtagcataagttgggtaattttcatcgtgacttaagttcgttaacatgtcggtatattcatctaagcgaacgtaagcattgcgagcttcacgcttgtcacgaaccttgttgccgtaataccaaacatacattatgaagccgatagcaccagcgatgaagagtgaaacgtaaccaccatgagtaaatttagtcaaacttgaaatcataaacatgatgtcaaggacaccgaagaagatcaagaagatccagttccaaacagtgttgactttcttcattactaaccattcataaagcaggatggtagtcattaacattgaaattgtaatggacagaccataagctgcttccatgtgagctgaagtttggaaatataagacgattgcgatagtagcaacacagatacccttgttaatggaaggaatataaatttgtcctttttcgttagatgggtagttgatgttcattcttggcaagaacttcaagcctgaagcttctgcaactaaagtgaatgaaccggtaattagggcctgagaagcaataacagcagcaatagtagccaaaatgatggcaaacaatctgatgttagctgggatcatttcaaagaatggattgagcacaccgccgtctgcaggacggtaagttgggttgttcaaaatccaaacgccttgaccaaagtagttgagtgacaagcaaacaaaaacaaatggccaagaaccaataatattgcttttaccaacgtgaccaacgtctgaatataaggcttcggcaccagtcgtagctaggaaaattgaccctaaaataaaaattccagccttattatatggactgactaataatctaatagcgtaaattggattgattgcttgcaagattgaccagtcaccgaccatgttcattacgcccattacacccaaaaaagtgaaccaaaggaacatgattgggccgaaggctttaccaatgatactagttcccattttttggatagaaaacagaactagcagaatgactacagtgatggcaataaccatgttttgagtagaaacgggtacattgccgccaaagttcagtcctttcagtccttcaatcgcagttgtaactgtaactgctggagttaaagtaccatcggccaaaatagcggctccaccaattagcgctggtagaactaaccatttagctcgttttctaaccaatgtgtataaggcaaaaatcccaccttctccgtggttagttgccttgagggcaataattacggtttgtaaggtagttagtagcgttacagtccaaagaaccaatgaaattgatccaatgataaagtcacgatttacattaccaatgccgccgttgccttcgacaattgatttcataacataaagcggactagtaccgatatcgccgtaaacaataccgatggcgattagtaagccggccgcgctcatgcgtttagctttattattcattatctcgttatctcccacaacaaaattgtagttttaataaaaaaagaaaatgccacgatgacattttcccttattgtacctattttcgtctatttcgctggacaatgcaagtgagatttgtcagaaattgaatctagaatttggtgatgataaagttaatgcattataataaaaaatatgcagtaaaaaagctcccatacagggagcctttttgatataaattatgaaagtgatgaaggaatcttagtacgttggtcttcgtcccatttttcccatgcttcataagtaagcatttcttctggcttaacaccagtcttttcttccatggccttaagcaagtccttaaagttgtagtcgtggtattgtaacacatgatcaaccaacttcttgcgtgggaagtggatgttgtttaaaacatagcgattgatatcaaccatgttatgattttcatcgtaaaggttgataacttcaagatcgtcttcatcgaattcagcgatgtagaagttagcgaagacctttaagtaatcaggttgttctttgaattcttcctgtggcatagtagtcttgttagcttctggcattacgactttaaagtcgtcgttttcttcattttctttatcagcttgagcttgagcgttcttttcttcttcagtcaaagttgttacccctttatttataaataaatagatacaaagtcaataataattttacagacttctacaaataaaagcaaatagaagtggttgagagatgcaaaagtatagaagtcagttttgattagtaaaatggagtaaaatgaagtaaaatataaatgtaaaaagtaaaatgaagtaaaatgaggaaaaatatgtataatgaaaatccttttgatgctgaatttggcgggatcccagagctatatcttgattttaatgatgatgcagttaaatttgctcaaagagcccatcgtctcaagaaacatccaacttattctctctttattacaggggtacgaggttcaggaaaaacagtttttatgaacaaagtgggtaaagaactaaaaaaatataaagatactatggtagtcactttgcacaattctgatgatctttttcgaatgatgtatatcaagctagtgcctatgctagataaaatcaaaaaatggacgccatcaatttctattaaagttccttttgtatcagtagatttcactgaagcaaatgaaaagcatgatgaaatatattataaagtagaaattaacaagattcttaaagctttgaacaaagtggggattcgtgttgcattttgtattgatgaagtgtcaaatacacccacaattcaaaaattggctgaggaattcaacgactggagcctaaataactatcaagtttcagtgattatgaccggactattaagtgaagtggcggaactatcaggcacacataatttaaccttcttggttcgggcggatagatttcacgtctctaaactatttgcgtcgtcaattgccagaacttacatggatgtattagacataacagctaagcaagcagaaattttggcagatatgtcaaaaggctatgcttatgcatttcaattgatcggagatttgatgtatgaaaatttaagtcaaaagatgacgtttgaaaaagctttggaatatactaaacttagattccgtgatgtacttttcaaccaagcgtatgatgtaattgctcatgaattaacggatgtggattttcaatttttgtacgctatggcgcaagataatagtattagttcaattattaggactatgcaaaaaagtaagcagtatgttaatagctatcgtgcaaaattaattaaatatgatctaattaagccaataattaggggaaaggtcggctttaccttacctttgtttagagatttcattcaagcaaagtatgatgagcttaactggggctagaatttattgaaaaaattcggcagaaaatcacagaaatgaacgcagatccagtttggagggatactattatggactatgagactaagctagctgaagagcgtgaatacggtgaagaaaaaggaattttaagtgcaattaagaaaattatttatcgtaaccggagctatggtgtatcagattccaaaactttggaggatctgacagaagactaccatgattctgtttcccgggatcaaattgaacaaatgatgaaagaagcctaggtctaatgaaaatagccgctgctcaatgtgagtaacggctatttttttacttgttatcatcagcagcagagctggaacttacggcagatgattgatcgttgcttgaggaagccgcgctggattggttgatggatgataatttaagtaattattcttttgaaaaaatatttcttacttgttggagtaaattatcgaattctgttgattcttttatgtggccgattatttttccatgacgggcaatgaaatcatacgatagcatttgaaataataatgcatctccatttgtgtgactagcataatctagcacatagaatctaaatggatcatctgtaatatggttatgagtaattgctagtcctattactaatccagactttttagtgtaagcatgtctgctcactactaaatagcgtctacgaatatttcctttttcagaatcatgtccacccatttcgtgaccagcatgtggttcagcatcgatcattattatgtcaccttgatggacatcaatccttctcatttgctagttcctttccgacaggtttgacttctctaggattgtatcctaattcttggtattctcgctttatttcagtatcataatcataatcgtcataagcggggtctgaccataaatcataattgtttttagcaattcttttgtatacaatatcaccgtttttatttacatcaacagagaattctgtattaagtggaactttgatagtacttggaatggtaagcactattgaatttccttgttttctagccttgactaccataataagccctccttatgctaaaaatattttattatttaagtatatactgtgaatacagtgagcacaaataaaaggagccacaaattggctcctttttcgttgtgtgtcgggcatggcatttgtctagtctagtgaaagtctagatcacgggtagttgtcgccaagtgtagcgaaccacaagccgttagcggtgacgctatgggtgaaggaagtggctagcgagttttccgagcctacgtacagaaacctggtcaggccaaatggtggatgagactgcagcacaagttaaagtccaaaggacaaccgtaaaaccaagacggtaaaccagggggcagtggaaaattaaagatgaatgtcttaccccgagagatctcgtggacaggtgaaaccgagtaagctttaatatcagcgatcgtaagcctggtcgaaaaaggttaatcgcgagaagtcagctgaggtcgtagtagtgctgaaggttttgtaatgaaactggagcgaagggcctaatgtttgtaagagcatatctcgctataagcaatgttcagacagtccggataagaggatagcctagcacaaagagaacgtaactctttgatggtgaaagcaattgggacaattctgaataaatttacaagtagaaatggagatatcacgagatggaactaattgaacagattttaagtcaaaataatctcaaggaagcaatcaggagagtcaaaatcaataagggagcgcctggtgtagacaggagaacagttgatgagcttgatagctattttaaaaagcatcaagtagaaataaaggacgccatcatgaagatgaagtatcgtccgcaagctgttcgcagagtctacattcctaaagctaatggtaagaaacgtcctttaggaatacccacggttgttgaccgagtaatccagcaggctattgcccaagtattaatgaagatctatgatcctcattttagtgagcatagctatggctttagacctggacgcagtgctcatgacgctattgaacaagtcttggaatatttaaacgaaggctatcaatgggttgttgacctggatattgagaaatactttgacacggtaaatcatgataaattaatttcaataattagagagcaagtaaatgacaaaaccaccctccatttaattcgagcctttcttaaagctggagtaatggaagatggttgggttaagcctaataaactaggtgtaccacaaggcggccctctttcaccaattctatccaatatctatttagataaaatggataaagaattggaacaaagaggcctgcgctttgtccgctatgccgatgactgcaatatctttgtcaaaagcggtaaatcagccaaacgtgtgatgaattcaatttcatcatggctagaaagaaagctattcctaaaggtcaacgcaaccaaaaccaaagttgtacgaccaaccaagagcaactttcttggctttaccttctggaaaagtggcgaatactggcaagcaaagccaggagatgaccgcaaaatcaagctttatgacaagatgagagaacttctctgtcgcagaaaagcagctgctcagcctctatcactagtctttactaagataaatcaagtagttagaggctgggtcaattactttagagttggcgacatgaaatattttctaattaagttcagtcaatggctgcgtcataaagtacgggtggtaatcattaaacaatggaaactaccaaaacgaatatacattaacttaatgcggattaacaaggcactaaagtgcaattttagtgatgaagatattcataaagtagctaatacgcgcttaggttggtataaaagaagtacgggtcatgtcattaactttctgcttagcccaaaagtattgggcataagcaaagcggatcgcccaggcttggtcgatccgctagaatattatttatctcgtaaataatcacaaacgtagcgccggatacggaaccgtacgtccggtgcaatgagaggggcgagttataaaactccctctactctattgcttacttgttatcatcagcagcagagctggaacttacggcagatgattgatcgttgcttgaggaagccgcgctggattggctgctggatgattgttcctgctggtgatcgcttgaagaagatgaagaacttgattgatcatctgacttcttggactgctctttatccttatcagatgaggattttgcagaatcatcctgactagaattatctttgttagaatctgcatcagaattattagatttttgctggtcaggatcagcgttctttttattggaattattataggaagtattattgtgcgtttgagtgttggcatggctaatgtaagcaccggcgccacctccacctaagatgaacatcgcagcaataacaccccaaaagactaatttcttcatattaagacaactctcccttatcttagaaaaaatattaacgaatttgagccaattggtgactttgaatcgttagttatagtgtaagacatctggccggcaggttgattacaaaatactcaattttaactaattattaagaggtagaagaaaaatatgaattacgaattaactgaacaatcaatccaatatgtatttggcaacaagaagtataagaatgggcaaaagacccgcaatttgaagaacgtgaagactggcgctaaggcagatgagttgcaaaaggtgggtcaagcaattgctagtttgcaagaagactcacttgatgaagcatacttagtgcagaagtcacgtcttgtaccagcagctgaataaattaacgaacatatttaggaaataaggagaaaaaatgatggctaaaactactaagactatgaagttaactttcttgaacggagaaaagaagaaaattagtattacgttgggggatgcagtcgataatctaactgcggatcaagtacgcggtgcgatgaatacgattgcggaagccaatgcattcgagaaagacggtgttgcatattatcacactcctcaatcagctgcatacattgaacgcactattactgatatctttaatgattcagcagaatctgcagttgagcctgcagctaagcaagactaatctggacttgcttgaccaactaattagcttggtcaaaaggctcaggagaaaatatcgcaagatgtagagttcacacttagacctttaacagaaatcgtatagtaatattactttttcaattgattttgttacatcgttgtaaaatttaagaaaaagtaaagaaacagtaaagcgggcgcatgctcgctttttcttgttgtgtctaggattacggcattttgttattttagatttgtgtgaatggtattgggatagggaataggtgaattattacaaaagcaagattatagtcaatttaacttgctattttttcaagaggttagtacaatatgaatcgtggtaagtaataggacgtgcttcaggcgtgtcgcctgtacgcatgctgatccttcaacaatgactactacctcatgagagttataaactcatggatcttgctttgaagaattttgtacattataggctccctacatgctgaacctatggcctattacattttttatatttcaaggaggaaaagaccacatgaagaaaaatttaagaattgttagcgctgctgctgctgctttattagctgttgctcctgttgctcctgtcgctgcttcagctgtttctgttaacgctgctgcaaccactaccaacactgttgcacctgcttctactgtttcagctgctacttctcaagaagttactgaccttggtacattaagaggcaccattgttcttgaccgtgcttcaaatactcaattcagtatcaaattgagcgatgctcaaaaggatgctatcttacaattaggtggcgatgcattaaaggatgctaagccagaagatatgaagaatattactgttaagtcagcatctgcttcaaactcaaatggtgaattccaacaagttgttacattcactgttaatgacagagcttaccaagttactttaaatgctaagttcgctagccaacaaggtactccttacttctacaacaaggatactaacactgttgtaaacgatggtagcactgtttcattaaacgaaattgctaacggctttagttcatcagatcttttgaatgctattcaaaagcactatgcttggaagaccagtgatcaatcaaatgacactattaatatgactactaccgcttcagatgtagaaagtcaattagtagctcaaggcttgaagcgtgcttcaaacggtaactttgattatccagcaaacggtttcaaccttaagttgactgctaagtcagaaaatggtaattcaactacaattactgtaagaattaatgcatcagtaaactacaatgcacctgcatttgtatttgacggcaacgtttactacaatgacaacgttatgtcaaatggtaaaacttcaggtaacttagtacttaaggacactgacaagaccaaagttattgtaaatggtaaatttaacaacgatgctgtaactggtgctgttaaagcttacgtacaaagtgcctatggtactggcttcgacaagactccagcagaattagctgctcaccaacaattgatcaactcaagcaatattaagattgactcaagcaaggttaacccaagtgttgcaggtttgtacccagtaactattactgctactaatccagctggctttacttcaaagcttactgtttacgcaattgtaatgggtcctactgaaaaggcaccacaagaatacgtaaaggctgataatactaaagtttacaacattaacggtaatgttgtttcagaagctgctaatattccagctcttgcaaagggcgcagctgtttacacattcggtaaggtaactgttaacggtgttgaatacactcgtatcaacaaggacggctcaaacgaattcgttaagagttcagacttaactgctactaagccagatactactgttgctagccaaagcaagactattatgcacaacgccttctactacaacaaggacggcaagcatgttgatactgacaagaagttgactcgttacaactcagtaactgtttcacctaagaccactaccatcaacggcaagtcttactacgaagtagttggaaacggcaagctttcaggcaagttcatcaacgcagacaacattgatggtactgaacgtactttgaagcacaacgcatacgtttacaagacttcaaagaagcgtgctaataaggttgttcttaagaagggtgacaaggttgttacctacggtggctcttacaagttcaagaacggtaagcgatactacaagatcggtaacaacactgaaaagacttacgtaaaggcttcaaacttttaattaagtctgtggtatacgctgacaaataagaaaggcagagcgaaagctctgtctttttttggaggaaataataatgaaaaagaattttaaatttactaacgcgtggtgctagttaaatcgttctagacaatatgccatattataagctaaaatagctatttctagccgttgttgaaaacctactaagctcctggctcgattattctcagcattgtaatagctaagcaaagaaaagtcgctttcgattgttcttctaattgccattaactgatgatcattatgctttttagcacccctcatgtttttacgatatggtgtccaaagcacgtatcccatacgctttagcttggctgctaagtcttttcctaaatagccttcatctcctaaaagataatggttaattggatgagcattgatcatcaattctaccgtctcttttgcatcatgtaccgacgccttagtaactgcgtagtcaagcagatagccatcatcactcactattgcgtggactttgaagccataatagtagatttttttcgtcgctttataaccaatatcggctatgccacggaagatcttaacgtgataattgcgaacaggctgacaaactggaatcggaaaactgtcgataatcaataattctccacctacctttacttcctgattccaaccctgacggatacaacgaattagaggcaagagcattcgagctcgacggttaaaacgagaatgagataagccaacgaagaatttacagaatcttcgttgagattcaattccaatttcagtttgccaaatgagcatcgctaagatagaactatcaggaagcttggtctgatcaacatttttacgatgtttaagtccatcaggcgcataaagcttatacagcgagcgacaaatcacatttaaccgattaaaactaacttgtaaatggtgagaaaaacgattaagcttgagatagttcaattagatcagactcttttctatttaaattacttacaacttgagtctagtctaattggacttttttattaactaaaacgatttaactagcaccacgcgtatttactagtattgtagcggcggctttgttcgctgcatcgcctgtagtttcattggtagctgccccaaatactattcaagcagctgcagttgtaactaaaagtagtgttgtcactcactatcttcgtgatagaagtgtatacacaaacagcactagaattagtgcttctacctcaattaataacatccatttgactaataatactggtactgaaattgaaacaaacgatgcagttttaaacaatggtaaatatactttaaatgcacaagtaacaataatgggtttgacgccaacttcaactgatcgttcagttactattgttaataacaatggtgaaattattggttctgctagtgttaatgcacacagtactcttgcacaaggtaatcttgaatttgattttgcggtcaagaatggtcgattaagtcatactagtttgggtaatattactggaaatactatgcaagaagaaagttaccaagaagaaacataataaagtagctcataagaagaatcacaaaaaggcacataagaaaactgtcaaacatactaaaaagagaaaataatttaaaacgaggcaattgcctcgtttttcttttgctcttaaaaattaagctaatagttatcttagactacgactagagctaacgagttgcattcgttaacttttttatcattatgatacaggtgcaatataaaaatatttaaaccatttaaggttattcgagaggttttagttaatgcattgattcattatgattatcagattcaaggctctgaggtaaacttcaatatgttcgatgatcgaatgaaaattatattgcctgatagcatgattaacgagaatagaatttaggataataatttactctacgagaaggaacgaaataatctctgacatttttggtagactacacttcaggataagaagaggtcatttcaagataatataattaaaagatggaaaatagaaaaagccatttcagcaaaaatgtgactgaaatggcttttttactcttctaacaaccaatcaagcagtatttaacttgaataccatcaattgttccaacatcaaattatccatttttcaatttgagaaccataattagcatagatactgttttttttataaaacataaaattgggggaactttttcttttgctctaaaaaaggcatcgctgttgcgacacctttgaaagataattttactgtagattattgattactgtttactgataaacttcatgtactagtttgataatttcatcatggctaagcatatcgccgtaattgtttgtgagttcttgtaaggcagtgtctttagtaccacccattcgtttaatgactaggactagcttcttagcatcttctatttttactttcctagcgacttcattcatttcatattccaacttgtccatatcttcgacccactttccgctattcacgtaatggtcgacatccttttgcaagctggcgatgtaaccttcagggtgattgatgattccattcatgtaatccaagaagtcaattatcttttggttcaggtcatgattattgcccttagaattgaaaactttaacgtgcgtaccagtctgaaattcaattcttcttattgctcatgacgtgaccaaagaccaaatcgtcagtgcttctcggatatcgactttttattttaatcatattttacctcatttcaattattgcttcagcaaaattaccctctactacttattacgcaaaaagtaggtaaaattttttatgaaattaaattttgttacaaaatgaacttattgttccatcacattacgtaatttacctaaaagctgctttttcaatcgtttcaacgtaatacgcggtataccgcattctttaactagctgcgtaattgtctttttctcaagcaaatgctcaaaaagaattacttgctcaagttgacttagtttgttaacttcatcctttaaagctacaagattatcccatgcctctgttttacctaagtcataagcctcgtcaattgcagtattgcgttcacatacgcgttgctctcggcgcagagcatcgattgtttgccaaagaacctttttgaagctaagcttatcaatctcactgcgaaccttttgcccatctaatttgcgcaacatctcggcatacaaaattacaccttcttgcaacagatcttcatagagatgatagtccggtcgaacatgtgccgcctttaaggcaccaccaactaacttacgatttttccatgcttcttcgaaatatttttgacttgtcattgtgacactctcctaaatgatgtcacaagcgcttgtgcactattagattagcaagattggatctgcaaaaaaacttagtggtgagatgctctaatcccaagtgtcgcatgtgtttgttaatttctacgataagcaaagtcaagtcagatagtacctgacgaagaacagatgatagtcaaaaaagtgcaaaaaaatacagctcatgagagctgttaacgattatatctgatcttaataatctgcttagtaaaaaagcggtgttcacggtgcaaataatctaatggcttaaattctttcacaatcgtaagtaggtgtaagttcaaaacatgattgtagaatttgtctgccagctttttaaaactatcaatagcgtacaagtccagttgcacataatagttagaattatgcaggattgaatcagaattaatggctgttacgcgaagattattttcttgcaacatatgctgataatataagtcagaataataatgattatgaaacagatactgaccaattatcttcgtaagattgggcttaggagaatcaaaagcaaaattataaaccaagccgttttcatcaagtgcaatactgttgaaaatagcttgatcatggcgtttgacgtggaagtctttaatccagtgcaagcaaatccagtccgtgaagaagtttccactaaatgcatgcattgaaaaataaagcacattgtacatgacaatcccttgatagatatcaactccagcctcgcgagctagcattctctgccaaatcatatcgcaatgtacggcatgccgcatcaatccttgcatcatggcatgtgttgacttctgactaagcacaattccacgattcaggtcgaaggctactgccttatatttgcctaagataggattttgcttgaactcatagactgccaatgtgttcttattgagtcgatatttattgtcatacttgatgtattgctctaattgcgagtcattctcaattctccgcttggtaaggtccttggaccaattacgatattttatgtcagtgggcaagctaataatccccaagttacgttgcttgtaggctgacacatccatcacactccctatgtttgaatatatctatattgtttcaaatattgaatagtattatacagtatgaagcattgattgtatagctagaaattattatgctgaaaaaaacaattttataaaaaattttgccgattttttgtgtaataaataatagagggtacattttatcctactattttttagaaagaggtgcgcaatgaaaaatacgcacaaacaaaaagaattatggtttggtttttcagaagataaggtttttggcgaaatcatgtccaatccagctttctgcaagcatgttttgcaaggaattctgccggagatcctaattaagaagatctttccgcctaagaagcaagaagtaatcatcgatcctgagcatcgggatcaaaaagatgtccgactcgatattttggttgaggatattaacggcaacctttacaatattgagatgcagcggtcagacgatgacgatattgcccgtcgcatgcgctattatgcttcgaaaaacgatcaaaggtatactctccaccagggctatacttacaataatttgaaaaatgtcttcattatttttctttgcacgttcaaaattaagcaaaaagttgcaatcaagtctacataccaaactattaatgtagacaatcatgcagatatattgcaggatggcttgactaaaattataattaattcaaacggagttcctgatggaaccgagactgaaacattacttaatttagtcaaactcatgaaagatttaccggtacatggcgataaactctttgataaggcacaaaaacgcatcgaatcaatgaatgccgatccagaatggagggacactattatggattttgaaactagaatgcttgaacgcgagcaagttggtgaaaagaaaggtcgtatggaaggcgagaagaaaggcagaaaagaaggcgaaaagaaaggcctacagcaaggccttaaaacaggtgcacttacattagtcgcttctttgaaagatgtaggctgcactagccaacaaattctgcaacaattaaagcaaaaatatggcaatgtgttctctgataaacagttagaagaatttctgaaacagagctaagttgtaacaacaatattttccaagatgtcgcataagcggcatcttttttagagccaaaacattaatttaaacgtaaatactgcaaacaaaccctgaatatagaaaaatatagaaaaatatgctaacatgtatatataaaagtggaacgacttgcatgtgcgagagttaagacacaaaaaaatcgctactctaatcggacaaatgagtaacgattttttgtttcaccaaattttatagcattaaaactaaatgtattggctgaggctagtgacgcttgtgatgtcttttagagcccaatctataatttttacgccttttgctatgaccattgcctagccgcttgtcaaatagtctctctaagacataagaaactacgttcactaaaagtggcgctaagatagagcctaataaaaagtgaaacaaatctagcatgtgttcacctcccaatgcgagatctgatattggaaggcataaacgtcaacgtttattataacaaatggtttatagagttggatttaaaattagccagtacatggtgacaagctttttgataaggcacaaaaacgcattgaatcaatgaatgccgatccagaatggagggatactattatggacttggaaactagaatgcttgaacgcgagcaagttggtgaaaagaaaggccttaaaacaggtgcacttacattagtcgcttctttgaaagatgttggctgcactagccaacaaatcctgcaacaattaaagcaaaagtatggcaatgtgttctctgataaacagttagaagaatttctgaagcagagctaggttataacaataatattttccgagggtgtcgcaacaagcggtacctttttctagagcaaaaagaaaaacgaggcaaattgcctcgttttatcttatctactacatagacttaattaaaagtttgaagcctttacgtaagtcttttcagtgttgtcaccgatcttgtagtattgcttgccgttcttgaatgtgtaagtaccaccgtaagtaattacttcagtacccttcttcaaggtaaccttgttagcacgcttctttgaagtcttgtaaacgtatgcgttgtgcttcaaagtacgcttagtaccagtaatgttgtctgcgttgatgaacttgccagtagccttaccgttttcgattacttcgtagtaagccttaccgttgatagtagtagtgttcatagcaacagttactgacttgtaacgggtaagcttgtcagtaccaacacgcttagcgttcttgtcgtagaagtaagcgttgtgcataatagtcttgctttggcttggtacagtagtgtccttgccgttagcaacattaacggttacaggtaaagtagcgtcaacaccattaattgatgaagttacctttacattaactgagaatgaagttggagcagcaaaccaaccagcattgtcaactggaatattagcagcctttaaagcagcattaacatcagcaactacagccttttggtctggcatttgtgatacagccttaccatttgaaacttggtaagcagcaaagttctttaagatttcactagcaacagttgaaacgttcaaacgaccgttaacaccagcagttacattaactgaacccttagttacttgtgaaccgtttgaagcgttgtagaagttaataccgctagcatttgaaaggtcaagtgcattaacgtttgaaactttaattgaaataggattctttaaagtaccatcttggctaagttcaacctttttagtgttagcaaagctcttaccctcatcagttgagaactcaacattgctgttctttgagccaagagtgatagtattgtgtgcgttagcaataccaaagttgaatgatacaccctttacaataacagtatataaaccattagcaagcttcccaaaatgaataactggtctatcctttgaatcaataacagaaactttaccattcttagtatctaaagtaccagtgtatgattggccattgtaactagcagtaatgttaccagtaatgctaccgttaatagtttgtccatttacagtagaagctgcaatagcagtaaggttaggtgttacatcaacatcgtattttgcatcagctggagtgttgattgcggtaccatcagcattaattacagtgtatactgtgttggtagtggttgcagcagcgttaacagaaacagctgaagcagcgacaggagcaacaggagcaacagctaataaagcagcagcagcagcgctaacaattcttaaatttttcttcatgtggtcttttcctccttgaaatataaaaaatgtaataggccataggttcagcatgtagggagcctataatgtacaaaattcttcaaagcaagatccatgagtttataactctcatgaggtagtagtcattgttgaaggatcagcatgcgtacaggcgacacgcctgaagcacgtatattgtgtactcgatttttttcaagcaatgaaagggtggtttctgtcctcttatttgcttggggtcggttgggtggtttttgtccgctgcgcagatacttttatgaaaaaagagtacgatgcgatttgatgatttagagtgtcatttttggttttgttaagggatgcttgtaaaataataaggtaaagaaaatctaaagaagtaattttgtgaaaaagaaatcgacattttttgcgtacttatatattgtcaaaattaagatatgtaggtgataactatgttaaataaaaaggataaaactaaaattcaagaattaactgataaaacagtggacttgatcgtagaaaatatggggaaatcgcgtaaagaagcggaacaagattttcaaaagtcagatacatatgcgttcttatggctagcgaagcgtaatatcgaaaatgcgcaccctattattttgtacagaatgtttaattctgagttaaaagctaaaccaatagacgaagaacaacaaagttttattgactttatgactgataacacaatcgagttaattacacagaatactaatttgggaagataaaaggcaactaaagttttcaaatctacaaaggtatattggatactagttcactcaggacataatttagatgaatcttctcccgaagagctgtttgatatgtttagaaatgaacttagtataggtaatccactaccttcatctatgctgaagttaacttattaaaaaatttatataagttaaataatattattacaaatgttacttttttacgacaaatctgttgaaacgcttgtctagacctaatttgatagatacaatggaggtgttatattaaggaggataattttttatgaagaagagacttttgaccagttttgctgctgccgcaatgcttacttctgtagctgtgccagcagtaaatactacgatgatgaatcaagcctcaagccaacgagtttctgccgctaccgctgatcaaactgcatttttaaacaaggctgccaagcaggcagttaaagcagctaaaaaatatggaactttgccatcagtgatgattgcccaggcaataactgagtcaggctggggaaagtcaggattagccgtgaatgctaataacctttttgggatgaaggctgatgattcttggacaggtgagacttatactgccaagactagagaagaagataaaaacggtaagagctactatattactgctaagtttagaaaatacccatcttttgaacaatcatttgaagataatgggagtaagttgagaaatggtgtttcttgggatccgttgcgttataagggcacttggattgaaaatgcatcaacttatgcagctgcaaccaaggctttgaccggtacgtatgctacagactctaagtatgataaggcattaaatagtcatattactagttctaatttgactaagtatgatccagtaaccgttaatactactagaacttatactgctggcaaggatagttcaacttataattggccaactgctccatctgttgccagtgttattggctctgttaaagctggtgaaaaagtagtagttaccaagactattactttccatgatggttcaagcagaatgtatattgatggtcgcggttgggttaatggctcagttttggacaagagcagttccgcaactaaggaaccagtaactcaggcacctaagaatgtgccagctgtttctaagaacttgatgcataatgcctatgtttatgaccaaaatggtaagaagctaaagggcaagatgtacaagaccagtgatgaaaacggtggtaagtggatcaatacttatggtaccaagaccatcaagggtaagacctactaccgtgtcggtgaaaatgaatacattgcagctggtaatattgatggtagcctcagattcttgaagaagaatgcttatgtttacaatcaatatggcaatcgcgataacaatttgaagcacaagaagaatagccaaattgctacttacggcagtgctataactatcaatggtaagaaatactataaggtaggtattcgtcaatacgttaagaaatcgaacttcatgtaattaaggaaagggctttgttgtgaagatacgcaaatttttaattgccttaattgcgcttttggggttagtcggcgtatcatcggtcagtaaccaggtcaaagccgcttcgattaatactttagcgaagaaatatcaatatagtggtgtcacctatttatacaagatgctcaaactagaggggattaagtacaataaattccctggtgttgagtatcaaaatggcaagccagaaggaattgtcgttcatgagactgacgatcccggagctactgctcacgatgaagcaatctactttaaccgcgagtggaaaaatatcaacgcttacgtcaatgcttttgtagatagtaagcaagtcatccaaatgtattcacctaataatggtacttggggcgcaggaccgaatgccaacaatcgctttattcaaattgagctttgtgaagaagatagtcgtgatgcctttgctaagtcagttaataatgatgcaatttatattgccaagttgcttcatcgttacaatttaaagccagacaatgcttgcgatgatggtgaaggcacaatttggtcacacaaggcggttagcaccttcttaggtggaacagaccacgttgaccctgatagttattttgccaagtgggattacgacatggatcagttttattctttgatcgagtattactatgacttgcaaaagaagaatgaaaatactgatactaaggatccaaataagattaaggacgaagtaccagcagaagttcaaggtgcggtaactttaggtcacgatgcttatgtttatgacaagaacggcaagaagaccaagatcttgaagttagctggtagtccggtaaccgttttaggctacaagataatcagtaataagaagtactatcaaattggaaagaacgaatacgtagtagctactaatattgatgctactgctagaactgttaagaagaatacatatttgcggactcgttcaggtcgaattgaaaaaggtaatttggtcaagaagggtagtcgggtcatgacatatggcagcaagattacaattaaaggtcaaaagtattatgctttaaatgctacacaatatgttttagctagcgatattaattagaaaaatacgtcttaaaccataaataatgggaattaagacgtattttttgtataattcttgtgttgaatgtgaaaaggggagaatttaatggcgcaattatcattatttttggtcgtcttattagcgctcgtaattccaatatttatggcgcgtttcaaaataagcactgtaccaacggcgattgctgaaattatcgtcggaattattgtaggttcgagcggatttaatatcgtggtttcgatacatgatttaacatttttatcgaacctcggcgtaattttgctgatgtttttatcaggaatggaaattaattttgacctgctacagcgcaagaataatcctaaggctaaatcacaggcgggaaaaactgtcgatccgttgccaacagctttaacagctttcgctggaattgtggtaatggcctttgttttggcatatgttttaaagctgatagggctatttagcaatgttatcttggcagcgattatttttatgaccattgcattgggtgtagttattgctaccttgaaggaaaaggatattcttggccgaccgattggtcagacaattttgttaactgcggttttgggcgaagtaataccgttgctcttattaacgatttatgcctcagttaatggagggaatgctggccagctttggttgattatcttactgtttatcgctgcgattattcttttgcggcggtttaagcaaccgtatttatggtttagcaaagtaactaaggcaacgactcaattggatattcggttagccttcttcttgatttttgctttagttactgtagctgagcgagttggtgctgaaaatattttgggagcattcttggccgggatggtaatgaaattattggaaccaagcgaggcaactaaagataagctaacttcaatcggttatgggttctttatcccaatcttttttattatgactggcgtgggcttgaatttaaagtcactatttgctcatccatcatcattgatgttgttgccagttttggtcattttcttgttcttagctaaagctcctgtagtttttctttatatgcgctattttgaaaagaaaaatgcctttgctggtggctttttaactgctactacaattacgattgttttgccaactctacaagttgctagaaaattgcatgcaattacttcaacacaatcagatgcctttatcttagctgcggttattgtttgtatcgtgagtccgattgtctttaattcaaactttgttttatcacctgaggatcggatgaaagaaactgttactattgtgggtgccaatacttttacggtaccagttgcacatgatttgcatgataattggtatacgatcaagatgtttaccgatcagcaggaccaatacgaaacttatgatagtagggttaaaggtttaacattacttgataatttggataatcaaagcttagagcgtagtggtgcctttgattgcgacattttcgtagctgcagggcatcatgatcaagaaaatgcacgaatggcggaatatgccaaagacttgggagtcaaacgagcaattgcccgaatgaatgaagtcgatagcaatacgatggctcgatgccaggaggcaggagtagagttgttcaactttactaatgtacgttctgctctgatgcgagctttgattgagtctccaacggtctacaagattatgactgatactaacaatgtgttgtactcagttaaggtgagaagtacttcctatactggacgaccacttagggatctggaatttgtggacaagattacggttagtcgaattcggcgtggtgatgagtggttaataccacacggttggactgttattgagccgaatgatatcttgatcttttctggagaatttaaggttgctgatcgagtaaagaagttacttagtcatcaaaattagagataaaaagaggctaaatgcaaaaatcctgcatttaacctcttttttacgtaattaatgattttgtccttcaactgcttcaatgtcgccttgtccatcgcgctcaacaatagccccaattgcagcgattaagcctttaacaatatcggctaatgccattgatggagtgcttggtcttttgacaacttgttctggcaaaaatgggatgtgaatgaagccagctttaaggctagggaattctttagctcgcatgtattgcacttgataaaagatgtggttgcagacgtaagtaccggcagtgttggaaactgtagcaggtagaccaacagcgcgaatcgccttagccattgccttgattggtagttgggtgaagtaagccgtgtcgccatcggcttggataggttcaccgagcggttgataaccatcgttgtcggggatgcgaccatcgttaatattaatagctactcgttctggggttaaagcagcacgcccaccagcttgaccaacattaagtacataatctggtttttcttgcacgatggcatcatgaacaacttgggcagatttattgaaaaccgtaggaatttctaatttgataatttttgcacccttgattgagtcaggtagttttttgactgcttcaatggcggggttgatcttgtcgccaccaaaaggatcaaaaccagttactaaaattttcaatggcttttcctccaaatttaaatcatagaattttttgctttagtcaaaatttgcattgtctctaaagtattgacaaatgcttcatccgctttttgcgtatcgtgttgatcaatcatctgggcaaaagtattaaattcagctgccattcggtgcggatatttatttaaattataacgcttaggttgctcatttctcatttcaactgtgaaattatcaagtgttcccgttgagccgtcaaaatagatactacctttttcaccttcgataaaagaacgtggcgttacatagctatcttttgatgccgtgagggaggcttgtttgtcaggataagagaggtgaagaataccagaagtatcaacgcctttttgcatgttggcataatattgcacttgatcaggcaagccaaacaatgccgagacaagatgaatgttgtagatatttaaatccattaaagcaccgccatcttttttaggatcaaaaaccggcgcaattttgccttcaagaaaggcgtcatagcggctagaatattgcgtataatttaggttaacaatatgaattggtgcgatcttgttcaattctttttggatttgtttgaagttttctaaataaaggttagtaattgcttcaacgatgatcaaacccttttcgtcggctaacttttttaattcttttgcttgagtggtgctctgaacaaatggcttttcacagattacatttttatcgtgttctagagcagctttagcaatctcataatgcaagaagtttggcaccgctacataaactgtatcgacttcagaatcagccattaattcttcattgtccgtataagtacgtttgatgttgtactttttagctaattcccgggcaatattttcactgcgcttagttgaggaaatagccgttacagtcatattcgcaacttgatcagcggttgttaaaaagtcatggacgatcatgccgctgccaataattcctaatttcatttttttgcctacttctttttagtattagtggttggtaaatctttagcgttagttgcagagtctggtactcttaagaagtcatggctgccgaagttgccataactttgaccaactttaacgtacattaatttacctagtttcatattaacaaagacattaaaggtagataatttattacctttaattacagccttaacattcattgattggtacttgcctaattttttaatttggctgaaaattttagcttgatttgtactttgagcagtagtgtcaaaaattggtgctgctgcctttttcatcaaagcttggtcagtacttttagcagttaaagtataagtgtaaacaccatcttttttgctttttttcattttataagcagaaaccaacttatcacttggattggtgatcatgtggttattcatgatggcatcggttaagtcggcataattatgaccggttagtttttcaaggtcagccttgtaccaagtatcttgtccattaatgtagacattgttaaggttgacccattcctcagtagaactagttttacctttgctagtggtttgattggtgatgtggtaaacagtggttttaccaccaaaggtagtgttagctaaggcaacttgattagaagtgtcggtacccagagtaacagattgaataacctgtcccgacttgaagctacttttagctttttgtacaacttgagtcttagtcagagctgaagtagccttcttctcttgtttactgcagccacctaataaaaagaggacagcaaaggataaaccgataatcgttttcttaagtttcatttttttctcctctatgcttcaataagtctattataactaaaaagtccgttgctcgttggagttacggactattcttttactttattttgtattaattttgcctaaatctacggccgatttcttgatagaagcaggtaccgtcaactttttgacttgattaatttgatcaatctgcatggtgaaattctttttgtgtccttcatccttataagtagaagtcacattaacatttttgatgtcgtaattctgatctacgttaattttgatttcgttgctaattggtttaacatcatcaagatcgatgccgattaaagcagtaaaggcagaatcagatacaattgcgttccaaatttttttgttatttcctttataagtaagcagataatcattgccgttttgctttaccttaaaatattttgcgttagggatgaaaggcatgagtaatgtgccgttcaaattgtcggtaatggcaccataggcactagccttagacaactttgtcttaaaccaacgctgagaattggtacctttcatttggatatagttgcttttaccctcaatccacattttatagtgattagagctgctagaaacattagcataaataatcgttggctttttagtatattgggcttcggctttttgcaaagacttgccattgcttaattcattccaagtagcgtgcattgaactgaatttcgttttttctgcactggttaaaatcgtcttggcagtaggtaaattagctgtcttttttgaacctgtcttagagcaggccgttaaaaagagtaatgctaataaaacggtaatgataatattttgatgtttaaatttcatacataactttctttcattaaattttttcttctagtatagcaagaataacgttacaaaattgaaaaaacacgatttttttagtcttaactctatgaaaaaatttgtgaaatgtgtaaaatatggatgaaacattgaattttaaaaggagatatttcatgtcaaaattagttttaatccgtcacggtcaaagtgaatggaacctttcaaaccaatttactggttgggttgacgttaacctttcagaaaaaggtgttgaagaagctaagaaggctggccgtttaatcaaggaacacggtcttgaatttgaccaagcttacacttcattattaactcgtgctatcaagactttgcactttgcacttgaagaaagtggccaactttggattccagaaactaagacctggagacttaacgaacgtcactacggtgctttacaaggtttgaacaagaaggctactgctgaaaagtacggcgatgaacaagttcacatttggcgtcgttcatacgatgttttgccaccagctattgatgatgacaacgaattcagtcaagcacatgaccgtcgttacgcaaacttggacccacacatcgttcctaaggctgaaaacttacacgtatgtcttgatcgtgtaatgccattctgggaagaccacattgctccagatttacttgacggcaagaacgtaattatcgcagctcacggtaactcacttcgtgctttgactaagtacatcgaaaacatttctgatgaagacattatgaacttggaaatgaagaccggtgaaccagttgtttacacattcgacgaaaacttggatgttgttaacaaggaaaagttggacgactaatttattaagtagttattcacacaaatagaacttcggcgtaagtcggagtttttttatacaccaaaaaaggcatcaccgttaagggatgccttctttgtatcaacttgctccaaaaactataattatttctttgatttcataatttttttggaacaacttcattatattataaataaagaaagatcgccatttttttctaagaaagtggtgaaaattgacagttgtatatgataagtgctattttgagttacaggagtgtagaaattgggagaaaaatatgcaaacaatcgataattctctctttcaagtctctgtcgatgagaatggggcccggatggcacatctggtgtctttaacagatcaatttgattatctcggcgagcaagaaagtgaagaaggtatggcacttgcttttccagtaatggatcaagccgataatttggctaacaagttgccttggaccgttgttgacaaaggtgatactcgcgtaagtctaactttaattgatacgccggagagctataagagttttccatatcattttgaagtaatgactacttatgctttggagggtaatcaagtcaatatatccttttatttaaaaaattcttcaaataaggaactgccattttctttgggctttatcttaccaacttcttggcaaagtgaaagccaggtcaataagattagtttgactggcaaagaacatggcattgatcttacttcaactgattttaagttgagtgcaaaagaaggaagcgttacagcttttacggataaaattgaattagaggcaaaaagtagccgtaattttgcgttaagcttgactttgaagtaaaaattagtaacgattttaataagatatactaagcaagtcagcgatgatttgctttttttgttataatacattcaatgtgaatttacatcataataggtatattttatgaaagatagaaaacaaagatctaatcacccgcataatagtcgggtagacacacacagttataaaaatcgtcatatttgggtctgggttattagtatcgtagccttgcttgcggttgctggagcggcgtactttgcatcagtttatttccgtactaagtcagcggttgataagacctatgatcctaagactgcagtgaaaactacaggtgaatttgatggaaagaagaagttcgctgttttactgatggggactgatacaggtgcccttgatcgaactgaaaagcgcggccggactgataccatgattttagctgtagttaaccctgctaagaagcgttacacattggtctcaacaccgcgtgatacgatggcacagatggttggaagcgagagcttcaagacagaaaagattaacgccgcttatgaattaggcggggctaagatgtcaatggattcagtttctaagttaatcaatgtgccaatcaagtattatgccgtggttaacatgggtggaatcatgaagatgattcgctatgttggcggaattaatattagaccaacgcttagctttgaatatggcggttatatttttaaaaagggcaagctgacccatatgggtggtgcaggtgcgctagcatattctagaatgcgttatgatgatccgcgtggagattatggtcgtcaagaacgacaacggcaggtaattaccaccttgatcaagaaggcagtttcaattagttcattatcaaatctggattcaattttgacttctgtgtcaagcaatgttcggactaacttgccatttagtgcgatgcagcagattgcgatgaattatcgtagttgtgccaattcgtcatctagtgattatctacatggttacaatgcaatgatcgacgatgcggcttatcaagtacagccaactagtgaattgcaacggatttctaacctggtgcgcaaagaattagggttacctaaggaaacggtttcaaataatgaaactttccaaaacgaaaagaatattgcaaatggctttagctttaagagcgaaaaaacgcagcactatcatatctatgattacaccgaagaaggtgataattaatggcgcgcatttgggctactctgattggctacgtttttggaaatttcttaacggcgatgatcgttggcaaaatctttttaaaaataaatcctactgaatacggttcacataatccaggaacggctaacatgggtgctgtttttggtaaaaaatggggtattttaacctgtttaggcgatttgcttaaaagtttaattgccttgtttattgtatattttgcttttccagctcatattaatattgcttatacagggctaggcctgatcttaggacattgttttccaatctgggatcattttcgaggtggcaaaggagttgcggttgcagctcaggtagcagttttttataattggaaagctggctttgctactttattagtggctttggtattaacagcaattatgcaaaatttgacgattccgcctttagtgtttatgcttttattcagtataaatacattcttgcataatcaagaagcaggatttgtttttatcgtgattactttgatcatgtgctttaagttctggcatgatatcgtagactttttcaccggtcatggcaaaaaggttgatattctgctttcaattaaaaagaagctagggatcattaagtaatgacagaaatttttagtgaggacacagactagagaaaatgagtgagattaacaagaaaaaatcactaaatgctcttcaaatcatttgtttgattgtcgcagcattctttatgctagtgcagatgtattcttggggtagcacttttggtagattaccattaagtaccctaatgagatttattccaggactacttggtcacagtacgatggtactagtaccaatggtctttggtgctgtttatagcaaaagaaaggttcatccaactgaagcctttaagttttggattatagcggttgttacactagtgcttttatacttggtgaacttctttaaacgaccaggtacctttaatatgtggaagctctggggagtatttttcccagttttgactagtacatcagtattgttggctggcttgatttttagtatgctagttcaaccatacttgtatgaattacaacatcgcattactactaagcaaaatgtattattgcttagcgcattaactttgactggttttgcgactagtgcaggtacaatgatctttaacaagtcaatttatggcatttatttgatcttgtactttgcttgggggatgtttttagctaacgttaaaattcctaaaaaggtctttggctggtcaattgcagctggagtaatgtctttcttcgtaatgtttatcggtattcccggatttaatggggtttactggtaccaacgattatctggtcgaagtggcgtttattcctggaatcctaaatttttaagtaatattgcttcaccatttttgttcttaatggttttagcagccttcttaatctttagaaaagtgattgttagctatagtgctaagcagatgcacttctttattccagtaattatttttatggacgctccaattattggtggttttgttaaatcgttccgctttaccaatagcgctggatttaacaagttcttgatgattgtcatcatgatgctagctgcctggggcttaagctggctatatgagcgctatttattcaaggtgaagccggttaaacggacggttgcttttttcaagcaacataataacttagcagaaattgttgaagatgcttggactaacttcactgcttggatagttgaaaatcgagtacgactacttacatggggctggttctatgtattaagttttgcttcattcttaattgaatcagataatctgcggatccaaattacgactgcaactgatatcaatgccgtaattttcttgctcgggactagattcttcgctattattttgacagcaatcttccttgatgcaatgtttgcaattttctacttcattactacgcgttactggacttcaacagttttagtaactgtaattacaattggttgggctattgccaacaagattaaattagatcttcgtggggaaccaatttatccaactgaattagacgaaattgttaactggaagaccttgatgccaatggtcggccaacaaaagataattatgatcgctattgccttagtaattatcattgcattgactgtctttcttgcaattaagtttccaattaagaaaaagggctcatggaaacgccgtggtatttgggcattgttgagtttgcttttgttcatgacaccagtgcgctttaaccacgatggcggaattatttatcacattaaccgtggctttgataataagcaatcgtttagaaaccctgaacgtgatattcaaattaacggtccattattgaacttcttgaattactttgacctgcagattatgaataagccaactaactattcaaaatctacaattcaacatttgaatgagaagtacagcaagatcgctaatgaaattaacaaaacaagaaagaatactctaaagaatcaaactattgtttacaacttgagtgaaagttttgttgatccatatactttcccaactgtaaagatcgatcctaaggtgccaaatccagttaaatttattcaatcaatggctaagagatctacttacggtagcatgcttagtgcaggttatggtggtggtactgccaacatggaatgggaaactttgaccggtttcaacatgggaatgttcaagtcaaccttgacgccatatgttcaaattgtgccaaaccatgatttctatccaacggtcggaatggacttcaattataagtctgcagttcacccattcattggtacttactactcaagagtagaagactataagagatttaagtttaataagtttgtttaccttggctctaaatataagatcattgatcaaaagaaacttggtaaatcaacttataattctgattacactacttatgcaaatggtttgaaacaaatcaatagcatgaagggtggtcaattcattaatttgatttcaattcagaaccacatgccttacaacaattggtatccaaacaatgaatacatgggcaaggtatctggtgaactcttcaacactgctgctattcgtgaacaaatggcaacttacatgaagggtgttcaatacactgataaggctgtaaagcaatttatcggtaagattgataagatcaagaagccaatcacagttgtcttctatggggaccactacccaagtatcttgtcacaaaactacgctagtcgttatccagtgcaaatgcactcaactcgctacttcatttattctaacaagtatgctagagaacatggtgctaagagcaagttgactcacaactctaattacgtcaacactagtgactttactgcaatgatgcttgaacaaactaattctaaggtaactccttaccaagcattgttaacagaagttcacaagaagttgccagcaatcacgattaacttcaatggtgatcaaggcttccaattagttgaccaaaaggggcacttcgttgatccaaagaaattgacttcagaacaacaagcaattttgaaggattacgaaatggtgcaatatgatatgactgctggtcaagcttatggcttaaaagctaagggcttttacaagatcggtgactaaataaaagagatcgaacgtaaagttcggtcttttttctacgtaaagtcaagcgcaataaggtgtttggctttattttttacctaaattttgtcatgagtatcttttagtggcgatttatttttttagaaagcatactaaataagcccacctctatatttaatttatgggcttagcgttataatgtacttgatcaattaattacaactaaagtctttttggttatgtgtggctacgttgtaatcatatagttgatcattgataatcagagcataaatggttctgattagtttatgaattgaagcaatagctatctttttgaaccctttggtttgagaggatagctttttgctgtgtgtcgggcatggcatttgtctagtctagtgaaagtctagatcacgggtagttgtcgccaagtgtagcgaaccacaagccgttagcggtgacgctatgggtgaaggaagtggctagcgagttttccgagcctacgtacagaaacctggtcaggccaaatggtggatgagactgcagcacaagttaaagtccaaaggacaaccgtaaaaccaagacggtaaaccagggggcagtggaaaattaaagatgaatgtcttaccccgagagatctcgtggacaggtgaaaccgagtaagctttaatatcagcgatcgtaagcctggtcgaaaaaggttaatcgcgagaagtcagctgaggtcgtagtagtgctgaaggttttgtaatgaaactggagcgaagggcctaatgtttgtaagagcatatctcgctataagcaatgttcagacagtccggataagaggatagcctagcacaaagagaacgtaactctttgatggtgaaagcaattgggacaattctgaataaatttacaagtagaaatggagatatcacgagatggaactaattgaacagattttaagtcaaaataatctcaaggaagcaatcaggagagtcaaaatcaataagggagcgcctggtgtagacaggagaacagttgatgagcttgatagctattttaaaaagcatcaagtagaaataaaggacgccatcatgaagatgaagtatcgtccgcaagctgttcgcagagtctacattcctaaagctaatggtaagaaacgtcctttaggaatacccacggttgttgaccgagtaatccagcaggctattgcccaagtattaatgaagatctatgatcctcattttagtgagcatagctatggctttagacctggacgcagtgctcatgacgctattgaacaagtcttggaatatttaaacgaaggctatcaatgggttgttgacctggatattgagaaatactttgacacggtaaatcatgataaattaatttcaataattagagagcaagtaaatgacaaaaccaccctccatttaattcgagcctttcttaaagctggagtaatggaagatggttgggttaagcctaataaactaggtgtaccacaaggcggccctctttcaccaattctatccaatatctatttagataaaatggataaagaattggaacaaagaggcctgcgctttgtccgctatgccgatgactgcaatatctttgtcaaaagcggtaaatcagccaaacgtgtgatgaattcaatttcatcatggctagaaagaaagctattcctaaaggtcaacgcaaccaaaaccaaagttgtacgaccaaccaagagcaactttcttggctttaccttctggaaaagtggcgaatactggcaagcaaagccaggagatgaccgcaaaatcaagctttatgacaagatgagagaacttctctgtcgcagaaaagcagctgctcagcctctatcactagtctttactaagataaatcaagtagttagaggctgggtcaattactttagagttggcgacatgaaatattttctaattaagttcagtcaatggctgcgtcataaagtacgggtggtaatcattaaacaatggaaactaccaaaacgaatatacattaacttaatgcggattaacaaggcactaaagtgcaattttagtgatgaagatattcataaagtagctaatacgcgcttaggttggtataaaagaagtacgggtcatgtcattaactttctgcttagcccaaaagtattgggcataagcaaagcggatcgcccaggcttggtcgatccgctagaatattatttatctcgtaaataatcacaaacgtagcgccggatacggaaccgtacgtccggtgcaatgagaggggcgagttataaaactccctctactctatttcataataatctgctatatgacacggatttgtcttagctgcattatcaatttgtccaatagctcgataaagcaacttacgtgcgactgcattgccatgtttagtaatacttaaattagagtccatttctcctgactgatatctgcctggatcaattccgataaaagcattgattttattaggattactaaatctgcgtaaatctcctaactctgctaaaactctgacagcagtggtctgtgcaaagcctggaatgctttctaggttttctaaatcatgattaggcaaagacttcgctaacttaaccattcttgcgattaaattttctctttgatcacttaaattaagcaatctgtgtgcataatactgcacttgctcgacttctatgctagagcaagatacaactggataagcttgataagctaattcaattaatttatctgcagtccttagagcgtgtttaaaagcaatcccctttaagctcattaaccagttaataagctgttttttatcttctcttcttactaagtcacaatgaggatatcgcacaactatttgccagtaatttttacctttagcagaagaaaatagattttcaatttcaggaaaagtcgattgtagagcttggtgaagtcgatttttagccattactaagtcagctgttaactggtcatagaagcggctcaaagcattaagctgcttataagtttgagattgaagttgattaattggatgatgatatagtctttgaattaaggctaaatgataagcatcagttttatcagtcttattatgacgtagtcccatatccatttcttttttagctttaagaggattaagaattacataatcatagccatagtcttccagaaaagattgcagtgtacgtgaataaacaccggtagcttcaaaaataatttgcggatgtttagaaaaagcggttaattcatgaagcaattgaataaaaccaggacgattattagtaatggttagttcatttttgctttcaccaattagttcacaaacagtagaagtagacttgcttacatcaattccaaaagtaacttgcataataaaaacctccaaaacttagtagtaaaacgtatttacttaagaaatcagatctaattttctaaactcgacatctagtgtccacattcttcgaagagactattgaaaacttaagtaaaactgccagttttgtatacgacatcaagtgtctaaagacctcagggcatatcgttttactactactttaattctacaaaagaataaaaatagtgaatcaattatcccgtcggataactaattcactatttagcttagaatgttttgtatccaatgataaaataagggctaagaggaataactgataattagctgatttaaaggtgattagaatgaaaaagataataacaatggcactagccagtgctgcactatttggatcttctgcaacaactgttcaagctgggacatataatcctaagaacattaccagttttaatattaataggcgtaactatgtagctaagggaaagatttataaactccatttacccgcagctggtagattagttactaatggcaatgttactttaaaaaatagtatggaatggacctgtattccttatggtaaggacaaaaatacgtattatctgcgtaaaggcacatattatttaactagttcaaagaatattagtgtgaagactacttatactcgtttaactaagatccgtaagaatttagaaacttacgttgaaacaaagaagaataatgacaacagtagtcttaaagctagaaagattgaaattggtcaagatattaaagcaatgggtgaaatgtacgattacgatagtgtcgactactacacatttactattgactcacctcaaatggttacgatgaggatgatcaataatccgatttatcagcttggaaaaggtaacattttcagcaagatgaatgtaatcatgttcagtgaaaataatccagttggcggtagtacgatgctttacccagagagtttcgaaattaatggcaataagattgctagtcaaagctggtacttgtctaaaggaaattatacttttagtgtaaatactcgtggactttataattttcaattaacggctgttcctgatacgcgtgtggtaccggcagatactgagatagaatctttacaaaacactaaggatggtatggttgctaacttaagggatgcacgtcatgcgaagacttatgaacttgcatggcgtgaaaaaggctcaaaggcagctccattcacttctagtagcaatactacagaagtaagtactgcacctgctacacgttacatagacaaaaatgatcgtaaaatcccagtttcaattggtaaaaaattagttaatggtcaaagctactattttgtagctcgcggtgtaagcaatcctgattacattcgttacggcaatccggaaaaagataattattttggtgcttggagtaattcagtagaacacacttactatgcaccttcagatgcaacaccaggtgcagttgatttaaccactgctaaagctgacagtacttatcacaacattcatgtggcttggaataaaattgctagtgcacaaagttatcgcattgcctaccgccaaaaaggtacaaataagtggtactatgaagtaactgatcaggctactaacgcgattactggtattactagaaatagaaattatgaagtgaaattgcaagcattgaatggtgaaaaaactggtccatggtccgcaattaaaacaatttttgtaaaatagcggttgactaaaactatttttctcgttaatatcataactaacaaatgagtagcgagtcggctcagcgttcagagaactagcggttggtgtgagctagacaggccgattttagcgaagtacttaatagggttgctcctttaccggcttgaataaggcgcagcagcgcaaacgtgggtggtaccacggctaataatgtaatttagtcgtcccttggtcttttgaccaggggacgttttttattggaggaaaaactatggcaaaatttgatattttggaagatttaaaatggcgtggtgccattaatcaagaaactgatgaggaaggtttgagaaagtacttagcagaacatgacgattgggcattgtactgtggtactgacccaactggtgattcccttcatattggacaccttattccattcatgatcttgaagagattccaaatggcgggctaccatccagtaattttaattggtggtgttactggtgcgattggtgacccatcaggccgtaagactgaacgtactttacaaactgcggaacaagttaagcacaatgaagaaagcttaactaatcaaatgaagaagttatttggtactgaaaattttgaaattagaaacaatgctgaatggctaagcaagcttaacttgatcgacttcttgcgtgattatggcaagttattccaagttaacaatatgattaacaaggatgttgtagctagccgtcttgaaaatggtatttcatttactgaatttacttatcaaattttgcaagcaattgatttctaccacttgaataaagatgatggtgttcaacttcaaattggtggtagtgatcaatggggtaacattactgctggtattgatttaatccataagcttgaaggcgcagatcgtccagcctttggtttaactattccattgatgcttaaggctgatggtactaagtttggtaaatctgctggtggtgctgtttggcttgatccagaaaagactagtccttatgaattttaccaattctggattaatcaagatgaccgtgatgtggttaaatacttgaagtacttcactttccttagccgtgaagaaatcgaagatttagctgaaaagactgagaaagaaccttggaaacgtgctgcacaaaagaagctggctgaagaagttaccaagtttgttcatggcgaagcaggtcttgaagaagctaaaatgattactgatgccttgttctcgggcaatatcaagaacttatcagttgctcaaattgaacaaggcttgaagaatgctccaagtgcggaagctggcaatgaaaagaagaatattgttgatttcttagttgacactaagattgaaccttctaaacgtcaagctcgtgaagatgtaaagaatggtgccatttatgttaatggcgatcgtgagcaaagtactgatttcgaagttgatccatcaagtgactttgatggtaagtacgttattattcgtaaaggaaagagaaagtatactttagttacaattaaataattaaatatatgattttaacattttatatataaaaatagagggattttttcctctatttttttagctaataatcggagatatttactaccaactaatatttgtaaaagataaagataatgatttgtgtaaaataatattttacttcttaaattgttattttattttctaaaatcaattgctacaatctatttattaagttattcacaaattcacattattactatacaatttgttatttcaagtgtaataccaatataaaatagctgcgtataccttttgcaaatgctgatgcaaagcactctattaaaaactgactcttaataaaaatatgtgaaaagcagcactatctgctttacttctaatcaaacagtgttatagtaatagtgtaaagagaaagtaagtaaatagaaagaggttattaaaatgttagaatctaagaaagctattaagattatttcaagtttggtaatcggtttgagtttaggctgtgttcttactcctattgctcaagctacttcatttactgctcctaaattgggtactgcaacacaagctccaaccaatcctgctattaaaaagggtgataagatctttgttgttattaaagacaccaaaaatcaaaaagtagctgtttacaataaaaatgctgaaaaaactagcaaaaaagttgcaatgggttctacttataccgcaaaagacgttaagaaggttaataaaaagaagattgttagaatcaacaagagtcaatggttgaatactaaagacgtcgttaagaactaaataaaagcaaatttaataaccgttttgaatacttattttctaaaaatacttggagagaataaataaggacgaggatgttcaaatgaatgtcttcgccttttttggtataatgaagacgccgctttagctcaataggtagagcaccgccgtggtaaggaggaggtccccagttcaaacctgggaagcggcttagttgttgtttttggcaagaaaggaaaaattttatgaagcatgaacttacaatgaatgaaattgctaaatttcaaaaagaatatgagcaaaaaccacaaaatcgggttgcggaattggctgttgttaataatggtgtggctaaggctagtttggattcagaaaaggttaggaaattgaaccgcactttttcaattgaaatcccaactgataatgttactgatcaaaagcaatcgggtcgctgctggctatttgcggccttgaatacattgcgtcatggttttgctaagaagtataatgctaaaaactttactttttcacaaaattatttattcttctgggatcgaattgaacgagcaaatattttctttgataatattttgaataccgcagatcgtccacttagtgacagaacagtgcatacttatatgcagggacctgatactgatggtggccaatgggctatggctgtttctttgattaggaagtacggcttagtgccaacctatgctcaagatgaaagtttcactgccaacaatactgctttcttcaatcgtattttgaataataagttgcgagaagatggacttgtgttgcgtaagttagctcaagcaggtaaaaatgatgaaattgaagctaaacgtcaagaatttttgagtgaggtttaccgtatggcagtaattgctttcggtcaaccagtacaaaaatttgaccttgagtttaaggatgatgaaggtaagtatcattttgatggtgatcttactccacttgatttctttcacgactactttactgatgacttggatgactatattgttttgttcaatgcaccagatcatgaatttgataagctgtatgctttgccatttgaagacaatgtagagggcggaagtccagttcatttcttaaacactaaaattgaaaatcttaaagaagctgcgattaagcaacttgaagcaggcgaaactttttggtttggttgtgatgtaggtaaagatagcgatcgtcaaaagggaattttagctcataacctctatcaaactgatgctatttttaatattgaaactaagttaagcaaaaaagagagactggaaactggtgcttcgggttcaactcatgccatgacgatggttggtgtggatgttgttaatggaaagccacgtcaatggaaaattgaaaactcatggggaaacaaggtcggtgaaaaaggctactttgtgatggatgataactggtttgatgaatatctcttcaaagtagttgttaaaaaacaatatgtaccggaaaaactggttaagatttgggaaggcaaagcaacgccggtaaaagcatgggactcaatggcataatggaaattaaacaagttatcgattttactcaaacacacttaaagaatgaaaaaacgggtcatgatttttatcatggcgaacgtgtagctaatttggctagtcaaatgtatttagcagatcatgctgatgctcatgaagatagccgggtagttgctattattaaaacagcgggttatttgcatgacacgattgatgaaaaaatatgtgctgacccacaaaaggtaattgatgaaattaaagttttattgccgcaagtagggtttaatgaactggaggcatgggatattttattcaccattcaacacatgtcattttcagctaatattgagcatcactatcatttgcctttatctggacaatatgtgcaagatgctgatcgtctagaaagtttgggtgcgattggaattgcccgtgcctttacgtatggtggtaaacatggcaataagatttacgatccagagattaagccagccgttttaactagtcatgatcaatatcgtaaccatgtcgaaaccacaatcaaccacttttatgagaaactttttcatttagaagatttaatgaatactcctgctgccaaaaaagaagcggaaagacgaactgcatacatgcgcgactttgtacgtgaatttatgcaagaatggaatgtttagaataatttaattttgaataagccttgatacatcagcattgaggcttattttttaaataaattaaaaataatattaaaaaaaacttgcaaagcaaaaaatatttagctatacttataaacaacttaaagagttctattaattttctcataaacgaggggagcaataatatgaagtttaccaagttattcgctgcaggagcaaccgttttgattgctggctcaacattagcagcatgtggtagtaattctaattcgtcaagttcatcagctaagaaaacaattaattggatggattcggctgaaattccaacgatggacatttctaaggcaacagacgttaccagttttaaccaattgggtaacgttgaagaaggtttataccgtttaggtaagaattctaaagttgagaatgctttggcaacagataccaaggtgtcaaaagatggtaagacctggactttcaccttgcgtgattctaagtggtctaatggtgataagttaacggctaaagactttgtttactcatggcgcagaaccgttaatccaaagacggcttcacaatatgcttacctcttcgaaggaattcataatgccactcagatttctgcaggtaaggcaccagttaatagtttgggagtaaaggctgaaggtgataataagttagttgttaccttagacaaacgaattccatactttaaattattgatgggattcccattgttcttcccacaaaaccaaaaggtggttgaagctaatggctctaagtatggtacttcatctaagactacagccttcaacggaccttttgtacaaaagggctggactggttctaacctttcttggaagcttgtgaaaaacaagaattactgggacaagaagaatgttaagcttgatgctattaattacagcgtgcaaaagacaccatcaacagcttacaacttgtaccaatcaaataagcttgatgctactattttagattcacaacaaactaagaacttaaaacatcaaaagggttacactttgcgtgatactgcagcaaccttctatttgcaatttaaccaaaagaagaagattttccaaaatgctgacttgcgtagagcaatctcaatgtcaatcaatagaaaggcactgggaagtgctttaggtggtgctaataccccagcaaccagtttaacttcaaagggtgtagttaaccatgatggtaaggactggtcagaagttgttggtgataagaagaacgccgcatataacccaactgaagctaagaaactttacaagaaggctttgaaggaattaggcgttaagaacgtttcatttacaatcctgtctgatgatactgattcaggtcaaaagacgactgaaacacttcaaagtcaattagaagaaaacttgaagggtatgaaggtttcagtagctaacgtaccattcaagactcgtttgaaccgttcaactagtggtaacttcgatgttgttgtttcaggttggtcagctgactttgccgatccaatttcattcgttgacttgtttactagcaagaatgcacaaaataacggtaagtggagtaactcccaatacgacaagttgatcgctgattctaagactacagcagatacaactaagcgttgggatgaccttgaaaaagcagaaaagatcttgcttagcgatgaaggaatcgccccactttactacaagactgaagcttggttagttcgtccagacattaagggcattgtctacaatggcgctggcttaaactacaacttcaagaatacttatgtagcaaattaattaaaaaatcaggaggacatagtaatgattattatttcagcaattattattttacaaacaagacataaaaataatctctcttcacttgtaattgcgtaataatagtctagctatgatttgatgaatagatagaaggagcaaccatgtgaagcaatgtcattaagttaagacattgacaaattgaatctaatctctgtagaaccgaatcattatgatttggttctttttttgcataaaataaaggcgaaaagaacctaccttttcgccctctgattaaattattaaaccttcaaaattattgccagaaagctggtgttaattatgaaagcccttcacagaaatattttagatcgtcttgatcaaattatcaatgatactggaaagcatattcatgattttatcgatgatcctcatgccttcactaggaagcggtttttagatgcagctacagtcattaaaactactattaatatgcaaggaaaagatttgaccagtgagttgtttagagcttttggccaaaaagctattaaaaataacgataaagtagtcagtacttccgcttatgtccaacgcaaaggtcagctttcacccgcatgttttaagcatattctaactgtatttaatcagaatttatttaatatccagttatttgatcataaatatcgtatatttgccattgatgggtctgattttaatcaaatctggaatcctaaatcagagaatatcgttggaaatctcaatcataaaggaaagccatattgccaaattcatgttaatgcactctatgacctgttaaataatacttatcaagactgcatctttcagcctaagtcaaagatggatgaacgtaaagccgccgttcaaatgcttaaaaagctaaattgcggaccatatatagttactatggatcgaggttataccggctttaacatgattgaaaattgtaatcgcctgcctaactgttattatgtcatacgtactaaaacgggatatggcgcatttaaggaagtagctgagttgcctaatcaagagtgtgataaggatatagcttgctgggtgactacctctaattattattatgaaacccataaggctacagaaaacgttcatttggttaaccatcattaccgtcaatatataaaatatcggtctaaaaataccaaagatggcagctgggactttggagagttatgtacaataaaatttcgtgcctgtaaatttagaattaatgatcctaaatcaggcaaagaagaatgggaagttgttctaactaatctaaatagagccgattatcccttaaaaaggatcaaagaaatctaccatttgcgctggggcattgaaacttcattcaaaaagttgaaatatgctttaggtagcgtacagtttcattccaagcaggatagatttattgaaatggagatctatgcccacatgattatgtttaacgcagtcagtcaaattgatgctcaagcatatgtaccacaaaaaaaatgcaagtatcaatatgcgatcaatttcaaacagtcatgttttgtcatccaggctatgtatataatttcttcttcaactgaaatctttaaaaagattcttattcaaattagtcattacacaattccgatcagaccaggacgaaaagacaaaagaaatctcaaacccaaatcagctgtatattatttatatcgtgtagcctaatttctaaacaagatttgggtttatttggcatgaaaaaagagcattcaaatgcgataaatcgcaaatgaatgatcttaaaagtccaagtcgataatttgtcaatgtcttaacttaatgacattgccatgtgaaggttgctcctttttgtaataaaaaagaatgagggtcaaaatgaaaaagtggaaaaagtattttagtgcaagtttattaaccgtcgtatcagctgcaactttggcagcctgttcaaataaaagttcgtcatctggtaccaagcaaaccttgaattggatgactaaatcagaattacaaactttagatttgtccaaggtgactgatgcaactagtttagatcaaattaataattcgatggaaggactctatcgtttaggtaaaaattccaaggtggaaaatgctttggcaactaagactgaggtatcaaaggatggtaaagtgtggcattttactttgagaaagaatgccaaatggtctaatggtgatccagttactgctaaagatttcgtctattcatggcgtaggactgttgatccaaagactgcctcacaatatgcttatcttttctcaggagtaaagaatgcggatgatgtagtagcaggaaagaagaaggttgaaacactcggtgttaaagcagatgataaccaacatttaaccgttactttggatagaagaattccatactttaagctattgatgggcttcggggttttcttccctcaaaatgaacatgccgttgaaaagtatggcaaaaattatggtacctcatctaaaacaatggtttataacggaccatttgtatcaaaaggctggaccggttcaaacttgtcttggaagctagttaaaaataaagattactgggacaaaggcaaggtaaaactaagtaagattaattacagcgtgcaaaagacaccatcaactgactataacttgtatcaatctggaaaattagatgtagcattattggcaccacaagctacaaaacaattgaagaaccagagtggttatacaattagaccagcttcttcaacacaatatttacaattaaacgaaaagaacaagcttttccaaaatactgacttccgccgtgcactttcattatcggttaatcgtaaggcattagcttcagctgtaggtggtgctaacaagccagtcactaccttttcaccaaatagtatgactgaagtaaatggcaaagattatactgaattagtcaaaactgctgaaactgataagttaatgacatataaccctactttagctaaaagttattggaagaaagcacaaaaggctttaggacagagcaaagttaacttcactttgctaacctatgacgatgatgatgccaaaaaagcaggtgaatacttgcaaagtactattgagtcaaacttgaaaggcgttaatgtcagagtaaatagtttacctaaaaagactgccttagttcgtggtcaaaatggtaactttgatgctttactgatgggttggcaagctgactttactgatccaatctcattccttgacttgaacacctcaaatgcttcatacaactggggcaagtgggctaataaggaatatgataagtatgtagcagcttctaaaactactggaaacgaaaatactcgttttgaagacttagctaaggctgaacgtgtattgttaactgagcaaggtgtagtaccactttaccagccagcagaagcttggatggttcgtccaactgtcaagggcgttgtatataatggtgctggagctaactataacttcaaatatgcttatgttgaaaagtagactaaaatcctaaatatctaaataatagaacttataacaataaacaactcctctatgtaattaaaaagcagaccgaaaaaatccaatgtcattaagttaagacattgacaattaatattagacttttaaagcactgatttaacatttaattggttaaattggtgcttttttcgtacaacaaataaggcatagcacagattctgcttttttaagctacgcgatataaataatatacagctgatttgggcttaatatttctcttgtccttgcggcctggtctaattggaatggtataatagctgatctgaataaggatccgttcaaaatcttgcgttaaagaagaagccaaatacatgctctgaataatcaagcatgattgcttgaaattgatggcatattgatacttgcaatgcttttgcggaatataggcctgtgcatcaatttgactgattgcattaaacataatcatatgggcataaatttccatttcaataaatttatcttgtttggaatggaactgtacactgcctaaagaatacttcaatttcttgaaggaggtctcaataccccaacgcagatgataaagctctttaattctttttagcggataattttttcgatcaagattggttagcacaacttcccattcttctttgcctgatttggcatcattaattctaaatttgcaggctcgaaattttattgtgcataactcgccaaaatcccagcttagatcctgggtatttttagagcgatacttaatatattggcgataatgatgctggacatggtgaatattctcactggctttatgcgtgatgtagtaatagttagaagtagttaccaggcaggaaatctcacgatcacattcttgatcaggcaatgtcgttatttctttaactccgccttgtccagccttagttcgtattatgtaatgacagttaggcaggcgattgcagttttcaatcatattgaaactagtgtagccacgatccattgttacaatatatggaccacaattcaaagctttaagcatttgaacagccgctttgcgttcatccatttctgatttaggctgaaaaatacaatcctggtaggtattattcaatagatcatataaggcattaacgtgaatttgacaatagggtttctttttatgagaagaagcttgtacaatgttattcgatttcggattccagatttgattaaagtcagagccatcaatggcaaacaaacggtagtgatgatcaaaaagttgaatattaaatagattttgattaaaaacagtcagaatatgtttaaaacaagcaggagaaagctggcttttgcgttgaacataggcagaagtactaactactttatcgttctttttagttgcatcttcgccaaaagctctaaagagttcactgtttaaattctgaccttgcatgttaattgtagttttaaggactgtcgctgcatctaaagtgcgtttcctggtaaaagcatgaggattattaataaaatcgtgaatatgatccccagtattattgataatttgatcaagacgttctagaatattcttatgaagggctttcataattaacaccatctttctggcaataattttgaaggtttaaaatatataatatataagataggcgaaaaggctggtcttttcgcctttattttatacaaaaaaagagatcgaatccaaatgattcgatctctaaaaaagcacccttaattgtcaatgtcttaacttaatgacattggaaaaaatcggtctgctttttgattttcgcttgaaaaaagcaagttaggctagtaaagtaaaactaataattttttgaatgagaaaaggagagcttaaatgtcaaattgggatacaaaattcgctaaaaaaggtttaacgtttgatgatgttttattaattccagcagaaagtcatgttttgccaaacgaagttgatttgagtacgactttggcggataacattaaattaaatattccattgatcagtgcagggatggatactgtaactgaaggtgcaatggcaattgcaatggctctccaaggtgggctaggcgttgtgcacaagaatatgtcaattcaagcgcaagctggtgaagtagccaacgtaaagagcgtagttgtgccaactagtgctgcaaaggccgcaactgatgatcaaaaccatctgctctgtgctgcagcagttggtgtaaccagtgatacttttgaaagagcagaagcattgcttgaagctggtgctgatgcgatcgttatcgatactgctcatggtcactcagctggggtattgcgcaagatcaaagaaatccgcgatcattttccagaagcaactttgattgctggtaatgttgcgactggggatgcaactagagcactgtttgatgctgatgttgatgtcgtcaaagttggtattggccctggatcaatttgtactactagagttgttgctggtgttggtgtgccacaaatcacggctatttatgatgctgctacagctgcacgtgaatatcacaagccaatcattgcagatggtggaattaaatattcaggtgatgttgttaaagctttagcagcgggtggcaatgctgtcatgcttggctcaatgctatcaggtactactgaagcacctggcgaaatttttgaagataatggcaagaagtataagcgctatcgcggaatggggtctgttggtgcgatggcccaagcacacggttcaagtgaccgttacttccaaggtggcgtaaacgaagctaataaacttgttccagaaggtgttgaagctcgagtagaatataagggcgatgtttctgatgtagtctttcaaattgatggtggtctccgttcaggtatgggatattgtggtgctgcaaatattccggaattaattgataaagctcaatttgttcaaatcactaatgcaggtttacgtgaatcacatccacatgatgttcaaatgaccaaagctgctccaaactatacaaaatagatataataaaagttaaaaataagagagaaagcaaaatttctctcttatttttttaattttttggacattttaactagatatatttatttcttttggtataattaaaacaacattaaaaagtaaatgaaagcataaaataaaatgagggagcaattaatatggctagatacctattaaaacgtatattttatatgatcctcactttgcttatcgtggctacggtaacttttttcttaatgaaattgatgccgggttcaccttatgctaatgaagcaaagatgacgctaactcagcggcaaattatggatcaacagtatggtttaaataaacctatctggcaacaatatttgatttatattgcggggatgcttcacggtgattttgggacatccttccaatatagtaaccaaccggtagcttcattaattggggcgcgtttgggtgcgtcagtacaattaggtttacaagcattaattttgggagttgtccttggtgtaatcgctggggcaattgctgctatgagacagggtacttgggttgactcaactgctactgtaatttctattttgggtaaatcagttcctaactttgttttagcagttttgcttcaatactacatcggtttaaagctaggttggttcccaattgctggttgggggcaattttctcaaacgattatgccaacgattgctttggcagttggaccatttgcggaaacagctcggtttatccgaaccagtatggttgataccttaagtagtgactatattgagttaggtaaggccaagggcttaagtagaatggaagtcattagaaaacatgcaatgcgtaattcaatgattccattagtaactctgattggtccttatgctgtagccttgatgactggttcaatggttattgaaaatatctttaacgttcctgggattggtgaacaatttgttaagtcgattttgactaacgactatccaacaatcatgggaattacgatggtttactgtattggattagtagtaattctgttgattactgatattgtttatggattaattgatccaagaattagattagatgaaagcgaggcctagaagacaatatgactgaagaaaaattaaaccttcctgcagatgcctttgaacccttaccaaaagatgaagcacaggataacgaaaacattgcaggtccatctttatcgtttgcacaaaatgtttggcttcgcttcaagcagagaaaagcagctattatttctgcaattattgttattttgatgattgtagtagcttttggttcaaccccattcatcaataaatctactttagttaaatcgcacccacaatatgccaatttacctgctaaagtgccaggaatgagcgcaattaacgggttgaacggtaagattaagcaaaatggcaagtgggttgatgcttatgcccagaatggcgtgcctaaagataagtattttatcgcaggtacagattatttaggcagatctttgggacaaagaattatctatggtacaaagatttcattgatcgtcgctttagttgcagctttctttgatttaactatcggagtcgcgtacggaatagtgtccggctggaaaggcgggggagtcgataacgtaatgcagcgaattatcgaaattatctcttccgtgcctaatttaatcattgtagttttgatgttggtggtattaaaaccaggtattaagtcaattatcttggcaattgctatttcaagttggacgacaatggcacggcaagttagagcagaaactctgagtttgaaaaatgaagaatatgttttggcagctagatcattaggtgaatcaccttggaaaattgcttggaaacacttagtgccaaacctttcaagcatcatcattattcaaacgatgtatactattccaactgccatcttcttcgaagccttcttaagtttcatcggaatcggtatttcagccccagaaacttcactaggtgtacttttgaacgaaggacaaaagaattttcaattcttgccatatcagatgtggtatccagcaatcgtattgtgtgtgttgatgattgcctttaacttattaggtgatggtttgcgtgatgccttcgatccacggggacaaagatagaaaggattaacctaaatgccagaagaaagagttttagatgttaaaaatttaaaaattgatttccacacttatgctggtgaggttaaagctattcgtaacgtttcctttcacctaaataagggagagacgctcgcaattgtaggagaatcaggttcaggtaagtcggttactaccagaagtattatcggtctgttagcacgaaatgctcagattgaagacggtgagattgatttccacggcaaaaatttgctagagttatctgaaaaagaaatgcaaaaaattcgtggtaacgaaatttcgatgattttccaggatccaatgacttcgcttgacccaactatgaagattgggcagcaaattgcggagccattaatcaaacataagggtgcctctaagaaagaagcttgggctaaagccttggaaatgatgaaggccgtgggaatcccaaatgcagaagaacgaattaatcaatatcctcaccagttttcaggtgggatgagacaaagaatcgtaattgcgattgctttaatttgtgagccagagattttgctggctgatgaaccaactacagctctagacgtgactgtccaagctgaaatcttggacttgatgaaagacttgcaaaagcgggttaagacctcaattattttcattacgcacgacttgggcgtggtggccggtatggcagatagagtagctgtaatgtacgctggtgaattcttagaattcggtggtgttgatgaaattttttatgatccacagcatccatatacttggggcttaatcaattcaatgcctactttaaacagtgatactttggagtcgattccaggtacgcctcctaacttgcttgatccgcccaagggtgatccttttgcaccaagaaataagtatgccatgaagattgatgtggaaagaaagccaccatttttcaaggtaactgatactcactatgctgcaacctggcttttagcaccaggtgcacctaaagtggaaccaccagctgaaattacacgtcgctggaaaaaatataacttgatgaaacaagaagataaactgccagaggttaactagtcgcggtaaaggagatttttatgccagaaaaaaagaaaattttggaagtaaaacatctaaaacaatactttaaaaatggtcgtaatgtcaccaaggctgttgacgatgtaagctttaatatctatgaaggtgaaactttcggcttggtaggtgaatctggttctggtaagacaactactgggcgctcaattttgcaattgtataagccaactagtggcgaagtgatttttgaaggcaaaaatgtagcagatttaaaaagtcgtgcagacaaactagcttttacacgggatgcacaaatgatctttcaagatccttatgcttcacttaatcctagaatgactgttgaggacattattgctgaaggattagatattcaccatttggttaaaaataaagatgaacgaactgagagagtagaggaattattggaaactgttggcttaaatgcaagtcatgctagccgttttccacatgaattctcaggtggtcagcgtcaaagaatcgggattgctcgcgccttagccgtagagcccaaatttattgttgcagacgaacctatttcagctctagacgtatcaattcaagctcaagtagttaacttgatgattgaattacagaaaaagcgtggtttaacttacttgttcattgcccacgatttatcaatggttaagtttatttctgaccgaattggtgtaatgcactacggtaaactactggaagtaggtccagccgatgacgtctatgatcgaccacttcatgattacacgaagagtttgatttctgcagtgccaattcctgatccagaagttgagcggagccggacaaggattccttatgacgctcaaaaagaagaaatggacggaaagcaacgctcaatgcatgaaattcgtccaggacacttcgtacgctgctctgacgatgaagtcaagcattacgaagaagtagcggcaagctacgaaaattagataccaaatctaatgtaactctctctatattaatattatatttatgctaaaaaggcgatccgatatggatcgcctttttatatgatcattgctcgttaagctaatgaatcccatgctggtaggtcagtgattggaccttcagcgagcttcttttggttttcagttaagtacttcttgtggactacaacttcgtaaacatagtccttaaaccattcattattcatgacgtagaagcctttaacaccagatttatcgccccatgagttctcaactttccattgacgaacttcgccgttgtcttcatcaacaccaactaaagtcatggcatgtgacacttgaccgacgccggtctttaatctgtctgctttagacattttaaggtcaacgccgaataagtcatctaacttgtacaaattagtgtcaaggtaaccagttttacggtccatttgacgtaaaacatcgttaccaaaccaaacagcttcgccgtcttttaattgagcgatagcagcgctggacaagtattccattggtacattcaaaagcttgattctcagtgagccttcaatgttgtcttcagctggtagaccataaagcttgttatagtcatggtctggagcattggttaaaacaacatagtcatcaaaatcaacgtcgcccatgtacttgtgtaaaaactcaagtggagttaggttcttttctaaatgatatttcttgtcgtcatcacgatattcaagatcgaaagtcttaggtggttcacctactgcgatagcagtcatttggtaaacttcgcttaaaaatttttcgcgaacctttttaatttcatcatctttgccgtattgcttcaagtggcgcaatactaaagcatccttctttaacttatcgcccaaagcagtagcaaaaccagttgtatcattggtgttaaaagtttctggcattgcatatgaaggaacaacactatatttttcaactaaagcggcagccatttggaattgtccaccatcactaccagcaaagtctaagtcagccttaacttgacgtgaatcaagtggcatgtcagcactgtctaagattctgttgtagaacatgttagcacgttcgatcttatcccagaagaagttgtaagcttgtgagaaggtgaagtccttagccttatatttcttaccaaaagtgtggcgcaaaacgttcaaagtcgcaaacagccagcaacgaccagaatgtttttggttagtgacattatttgtatcaagttcagttgaaaagacgcgggttaattgtccttgaacacgatcattataagatgcttcaagtacaccactgcgttgagctgcacgagcaacgactttattttcaggttttttattaaattcggcagagaacttttctagttcctgcacagttaattcatgagccataaaaaatctccttttcattttataatttttttctcaatttaattctattttaaagcaaaacaaaagcgggttcaatcagaactcgcttgagagaattattaatccgtcaacttattagatttcttgcctatatctaataaattaatcaatttggatagaattgccatcattgccagcagtttcctttggcaaagtgatggtcaatacaccattatcatactttgcatgaatctcacttgcaactacatttggtaatctatagcttctagaaatactgccctcacttctttccttatgaatgatatttctatttttatcgctagtgtccttaaatgattttcttgtgccgctgacatttaacgtaccgtcattatagttaacgttgatatcctgcttatccatgccaggcatgtcaatcttaactagatagtccttatcagtttctgcaacatcagattgcataatgttttcaatttcattatcgtcaaagaagtttcttggaaaaccaaaccaatcattcattgcatccatcatgtcgttgcgccgattcatcatattgtttgccataaataaaacttcctttcatttttgtatttgcttaattagaatataaggaaaagatcaactcatttcttgatctcttttctccttacactgtttattgtagtcgctttttatagaaatgacacaaattagcactcaaaaatttatagtgctaattttagactgataacgctgctacaataacattctgagattgtagataattattacgtatagaaaaataaagaaagtttgtgaaatagaaatggtatatttttagaaaatgacaccagaaggctatcaacaaattgaggatgaaattgctcgattaaaaaaagatcggccacgtagaattaaaattttgcaggctgcacgagctttaggtgatctttcggaaaatactgaatatactgaagcaaaacgtgatctaggtcacttacaaagtcgtctgcgttacctaggcaaacaattaaagtatctaagtgtataattttttacggtaagttgaataaataattaaaaaagcccaagtcctttgaatttggacttgagctcaaacaaaaagaccagtagtctgatgttaagaacaaaaaacacattagaagctggtcttttatgaattcaattgtaactgaaatcgcaaatattataaagtctgaagataattatattaagcgtgaaagaaaaataatctgtttcttcttaaacctgattaaggaaatcatggccttggctttagctaaagttgatgatgaaatgattaccaaggttaaagcacagggctatcagattgataagaagaatgagcgctcaatcaatatggcttttggcgaagttaggtatgtcagaagaagatatgtctgcccaggcaaacaagcaaggtatcccttggatgaattaatgggcttttacaaatacaagcgctacagtattttagcagtcaaaaacatcttagaagtaagcagcgttgccacttatcgcaatactgctctagcagtcaattgcctgtctggctttaatattagccatatgcaggtgggcaatttggtaaaaatggccgggaaaaatattaaagcgggccaagaagcagattcaagatatgatgccgcaggcactaagaaaaaggtcccagttttgtatcttgaaggcgatggcgtggtgatcaaaggcactaaaagccggttggaatttcatcgctatcaggtctgtgaaggcattgtcaatataagcaagaaacgcagaaagcgaatcaatgccaaggaatttgtttctttaagccgacttgatgcgctgaacgaagccaaggagtacctggccaatacttatgatctttctgatactgtaattcttagcaacgccgatggcggtgctggatatgccaaaacagacttcgatgacattgtagggctatgcaagcgtcatgagcatttcttggatgtctttcacctaaataagaaaatcaaagaaaggctatattttgcgcctgacctgcaaggcaagctgatttctgctttggaatacaaatacagctatgacaaagttaaaactatcctaaccactgcagaaagccgactaattgatgaattgaataccgagctcaatcatgattatctggggcgcctaaggaattatattgatcgtcattgggacgatattaagccgtttaagaaacgaaaactgactgtgactaaagccattggctgctgcgagagcaaccaccgcaagtatacctaccgtgttaaggggcaaggcaagaaatggtcaaaatctggagcagaaggcatgcttaggatcttaagctgcatcaagaatcgagagctggaattttggcttagcagcgagtttgaagattcagaaataactgtattgactgaacaggaattaaaagcagcggcccgtgacagcttaaagaagcgtcatgaagttcatttaggcatccagcatggcgcattaaccgcacaggtagctggcaatagttatttaagcaagctaagcagaaatttaagtcatataaatatttaagaaattaaggttagactaatggtttaaaggctaccgcaaaaacattgacacttactaaataagttgagaactataataaactgtctttttctggtataatatgggttttgtaggatacaattcagagtaggagtgaagaatttgaatacgccacaatcaagagagggtaatgtgatccgctatgccgtttatttagctggctatgtcgctgtgtttgcagtagtaaagctagttactagaaaatctccggttcatatttgggatttgattttattcggcttagttgcagccatgattctgttgttttatgtttatcgtttcaatcgagagcaacgcttttttgcccgtgattttaaacttccatggttgggcagtttgtcaactgttgttctattaacattagtgattacagttacacagatttcgatttcatacttacaatcatatggcaggattagtcattatgatttccaattgatatatgccaaaagtgaatcagttaacatgttttggtttttaatcgttgtccaaggaattgtattaccaatcctacaagaatttttggcgactggctttttgttcaattatgcttttcggcgaaatactaagcaagttgcaattatggggatcattgtttcaggtctgatttatagcttactgagctttcaaaattcagtagtactgtttattattgatgcaatttatggcatggtgtttgcttggagctatatgtacacacaaacattattgatgccaatttacttagctgtagttagtggcgtacttacagtgattatgatttaaaaacaaaaggatgagaaaaattctcatccttatttttgtataaaaaaagcggatagcgtgaatcgaacccgcatctacagcttgggaagctgtcgttctaccatttaactatacccgcaatatgtttttattttagcattttttctatttgaagatcaacacttttacgatcaattaagctggtaaaattttgaaaaagccagcggcgtagttcgttgggcataacaactagaggcattctattatggattggcgccatatctttgttaggcgcggtagtaaccattgaaaaataatcctgatcataaatacctgcaattaaggtaagtggttgattagtgcggaaggcgtagctatcatggtatttacgaccgttttcagcaatatgggtagttttagcatattcaaagaatttttcggttaagattaagcaacgttgcttggcaaaggatttgtcccacattgaaggcgctgaatcataaaatcgctcaattctagcgttaaataatggcttttttggatcaacgggacttggatagccccattttttgttgtttaattgcaattgaccattttgataaagcaaaacaggtgctacttggttaggaaaaatatcttgtgcttgaatgtcaaaatttggtgtaactaagggcaggtcaagatcgcttttgagatattgttgaatttgttttaaattaggtaaacgaaactggttgcacatacgcatttcctttctttagggctagtttaatcatagcctattttttgttaaaattaggtaattaaacaattaatattaataaaaaaataaacttaaaaattagaaaagagcaaaaagatggcgaaagaaattttattaactggtgaccgtcctactggtaagctgcacattggtcactatatcggttcattaaagaatagagtaaaattacaaaattcaggtaaatatgatccatatattatgattgcggatacacaggctttgaccgacaatgctcgtaatccggaaaaaattcgcaatagtttgatccaagtagctttagattacttagctgttggtattgatccagctaaatcaactatttatgttcaatcacaaattcctgctctatttgaattgactgcttactacatggatttagtaactgtggctcggcttgaaagaaatccaactgttaagacagaaattaagcaaaaagatttcaaagactctattccaattggctttttaaactatccagtttctcaagctgctgatatcaccgcttttaaagcaaccgttattcctgttggagatgaccaggaaccaatgttggaacaaacacgtgaaatcgttaggacttttaaccgtgtttataattgtgatgttttggttgaacctaaaggttatttcccacctaaaggtcaaggacgtttgccaggacttgatggtaatgcgaagatgtcgaagtcacttggcaatgcgatttatcttgctgatgatgcaaagacagttcaaaagaaagttatgtcaatgtacacggatcctaaccatattcacgttgaagaccctggtaaggttgaaggtaacactgtctttacatatcttgatgtcttcgatccagataaggacaaggtggcagaacttaaggcagaataccaaaagggtggcttaggtgacgttaagattaagcgttacttaaacaaggtccttgaagcagagcttgcaccaattcgtgaacgtcgcgaaaagtttgctcaagatgaagatgcggtttatgaaatgcttctggaaggttcaaaaaaggctaataaagtggctaatgcaacacttgaacaagtccgtgacgcaattggtttgaactatttcaagaatagataaggctgaggtaaagttatgcacgatcgaattccttggaaacaatattttatgatgcaggcgctagtaattgcgcaacgctctacttgtaatcgcgcattagttggtagcgtcttagtaaaaaataatcggattattggcactggttataatggttccgtttcaggacaaccgcattgtgacgatgtgggtcatcaaatggttgatggtcactgcgttagaactattcattcagaaatgaatgcgatcattcagtgtgctaagtttggtgtttctacagaaaatactgagatttatgtgacacattttccttgctataattgctgcagatccttgttgcaggcaggcgtgaaaaaaattaactattattttgactatcgcgataatccattggcgatgcaactacttcatgatagcggggtgccttatgaacagattaagattaatcgcaaatacgtggaaagcttggcccataaacttgaagaagacgagaattaatttaatttggttaatgggactagtaactgtatttttaataacgacaggatttgtccagccaaatattgaagatcatgctcatattttagataaagaaactcgcactttgattacggaaaaaaataatcgctattttcagactaaagaacaaccgcaaattgtcgttataacggttaaaaggctgaataagttaacacctaagatgctagatcattctaagcgaacggtctttattgtggtaggacagaaaggtaaaaagcgtaatgtgcaaatttattcaactaaagatttgcatagtgccttcaccgaggtcgctcggggcaatatcttgcgtgctgaagtagataaattgcgtagtcaaaataatgcaacttttaacaagggaattcgcttcgtctttcgggcatgtgcgactagagttgatcaacaatatcaatatgcacttgataaatatgatttgacgcaagcagaacaaaataaagtcgcgcgtccacatagtgtagctttaccaatcgcactggcactggcatttttaattacgggaattacttatttcttgcgtagatttagtcatcgtgatccaatttctaagaaatagtcggcttgacttatttgcattttgtccttacactttttatagacataattagcgaaaaactgttaggtgagactcctacgtgaacacacgctatcgcccagaaacatccagagatgccaacgggttaaataggtgtcgtcgacttaaggcgagatccagatagctagcatgtgcttacgtcacgtagtgttaaaactgaacgacgagtatgacagagccttgtttggcaaaagtcacctgcagagttacaggtggcttttttgttttgcttgtcccaattaaagaagggagcaaataatgttaaaagcagctagcaagaagcgatcgaatatagacattcaaaggattcaacggattgcgcgtgagtcacgtagcgagacgctggcgcgtttacaggcgagtgctgaagggctttcgactaataaggctgaagaaaacagaagagaatatggcaaaaacgaaatcattactaatagcaattcctctaaatggcgcttattatgggaatcaatcgctacgccatttacgttggttttattagtattaactttattaaccctgtttactagctatattttggtgccacaaggagataatgacttaattactacgatagtgatgatcgtgatgttgattatctcggttctcgtcaattttatccaaaaaatcagaattgctaaggtaactgatcaattactcaatatggtatcagttacaacgaatatccggcgtgatggcaaaaatgtggaattgccaacagatgaagtagtggttggtgatgtaattaacttgtcggctggtgatatgattccagcggatatgaagttgttaactagcaaagatcttttttgctcatcaagctatttagatggggatcctgagccggcagaaaagatggctaatgtagtaattaagccgagtatggctaatgattatttgaactaccctaatattctatatgagggaacaactattgtttcaggctctggcaccgggattgtttttgcaattggcaatcacactgtttttggcaaagcagttcaggctatttcccgtaaaaaagtaaaaactaccctgtttgaccgggaaatgaagcaattagctaaaatattgattatcgcgacagcaattgtgattccgcttttgtttgtgattaatggcctgactaaggggaattggggggggaaagcttaattttcgctttgacagcggcagttggcttaacaccagaagtgttgccgattattgttaattccaatttaacacggggcgcacgggaaatatcccaaaatggtgctgtcgttaagcaaatgaatgctattcaaaatttgggctcaactgatgtgttctgtatcgataaaaccgggactttgacacaaaatcaagtggttttagagcgtcactatgatttagatatgcaagaaaccccacagattttgaagttttcatatttgaatgcatattatcaaactggggtaaaagatttaatcgataaggcggtaattgatgccgcgggcgatgaactagatgtaaacgaaattcagcgtgattacaataaaattgacgaaattccctttgactacactcgaaaaagaatgagcgtggtagtggtagataacgatgaacaccacgggcagcacttattagtaactaaaggtgccgctgaagggatgctggcaatttctaataaggttgaacttaatggaaaggttgaggatttaactactgcctggcgagaaaagatcttaaatcagattaatgaattaaacgatgacggtttacgggtacttttagtaggttataaattaaatcctgccccagtaggtgagttctctgctaaagatgaacatgatttaaccattattggctatttggcttatcttgatccgccaaaagaaacaactaaagaagcgctggaagatcttaaaaaagattatgttgatgtcaagatttttactggtgataacgaagcagttactcgtgctattgctttgcaggtgggattaaacgttgatactgtttatgacggcacccagatcgaagcggttagcccggaagagttgcgtgaaattgttgaaaaatgcgatatatttgtgcgaataaccccggaattaagagtaaaaattattaatgcactcaaagcaaacggtcatacagtcggttatatggggaatggcaataaagacgctttagcaatgaaggtagctgatgtgaccgtaacttcgaatacgtcagttgatattatcaaagagtcagccgatattatttttgagcaaaaagatttgcagctgttagaagaaatgattctaatgggccgaaaagtcttttcaaatacaatgaaatatattaagaccttcttggtaactaacgctggtagtgtaattgcgatggttgtttcatcgctgctcttgccatttttgcctcttttgccattgcaagttttaattttaaatttgctgtttagcataagttgtctggttattccctttgatagtgtttctaaaaactatgtcaaaaagccacaaaaatggtcgattaagagatggccgaagtttgtacttaattttggtccgattctagcaattattgattttatcgcaatgggcttgatgttttatgtgatttgtccatatttagtagggtctaattatcatcattgggtctttatgacactattttattcggggatttttgtggaatcgctttggacaagaattatggtgattcacactttgcgtgatgaacgttttccattctttaagcaacatgccacgccagtggtgttcttggtgaccattggtatggcaattattggtacaatgttgccttcatcaagtatcgcgccaagtttgggcctagctcaattgccgtttggttattggggcatagtcttcttgctagaagtaatctacattttactgacgactttggttaagcacttatatttaaaaaaagaaaaattctgatttgaattaaaaggaattgctggttttagcccaattcctttttttgcatgttaaaataaaatagatattttagacgattaaaggagtttgattaatcaatggctgataaagatactttttatattacaaccccaatttactatccatctggtcgcttaacgatcggtaatgcttatactactattgcagctgatacaatggctcgttacaagcgcagtcaaggctacgatactttctttttaactggtactgatgaacacggcttaaagattgaacaaaaagctgaagcacaaggaattaagccacaagagttcgtcgacaagatggcggcttcttacaagaaattatggaagagtctcaatatttcttacgataagtttattagaacaactgacaaagagcacgtagctgccgtacaaaagatttttgaaaaattattagcaaaaggtgacatctacctaggcgaatatactggctggtactcagttgaagatgaagaatactttactgaatcacagcttgctgaagtttacaaagatgatgatggtaatgtaatcggcggtaaggctccaagtggtcatgaagtacgtttggttaaggaaccatcctacttcttcaagatgagcaagtatgctgaccgtttggtggaatactacaaggaacatcctgaatttattttgcctcattcacgtgaaaaggaaatgcttaataacttcattaagccaggtttggaagatttatcagttacccggactactgttaactggggaattcctgttctaagtgatcctaaacacgtggtttacgtttggatcgatgcactttcaaactatattaccgctttgggctatggttcagacgatgattcattgtttaagaaatattggcctgcagacgttcacttggtaggtaaggaaattgttcgtttccacactatttattggccaattatgttaatggctcttgatttgccacttcctaagcacattatcggccatggttgggtattgatgaaaaatggcaagatgtctaagtcaaagggaaatgccgtttatccagaatcattgactagtcgttatggtgttgatccacttcgctattacttgatgcgtgctcttccatttggcgatgacggtatttttacaccagaagactttgttgaaagaattaattatgacttggccaacgatttgggtaacttacttaacagaaccgtgtcaatgattaatcaatatcaagctggtcatgttgatgcagttcccgttgctcaagctgaatttggcaaagacttgcaagatacagctgctagtgtcattaatgattatcgcgaaaatatggattcacttcacttttcaaaggcattagacaatatttggaagttggtttctcgtgctaacaagtatattgatgaaactactccatgggctttgaacaaagaaggtaaaaaggaagaacttagcaaggtcatgagcaatttggctgaaagcttgcgtttaattgctattatgattgaaccagtaatgaccgaaactgcaccaattatgttcaagcaacttggtttaaattgggacaatgaagacgctaagcatttggcctttggtgactttgattgggatgttaaagtaattgaaaaaccacaaccaattttcccaagacttaagatggacgaagaagttaagtacatcaaggatgaaatggctaaagctaagccaaagaagaccactagaagtgaacaaaagaagggtgacgaaatcaccattgacgattttgacaaggttaagatccaagtaggccaaattttgtcagttgaaccagttaaaggctcaagcaagttgctcatgttcaagctggactttggtaatggcaaggaaacccaaattttgagtggtatccgcaagttttatccagatgcaagtgagctattagacaaaaaggttttagctgttactaacttaaagccacgtaagatgctgggtcaccttagtgaagggatgctcttatcaagtgaaaagcatggcaaaattaagttagctcttgttggtgatgaacatgcagttggggctgaactcggctaatggagatcattgataatcatactcatttgaatgacgagccgtttcgcggcaaggaacaatattatttagaacgagcaaaagcacttgatgtaaccaaggttatttgtgcggggcaagatcctgactttaatcaaagagcggttgacttagcacaaaggtttgataatgtctatgcgatggtcggttactgtcccgatgtggctaaagactatgatcaacaggctgaagataaactaattgaacaattgaagcagcctaaggtagttgcaatgggcgaaatcgggctagattattattgggatgaatcgccgcgcgacgtacagcgtaatgtttttgcgcggcaaattgaagtagcacatgacttgaagatgccagttgatatccatactagggatgcatttggagattgttataacatcttgaaaaatagcaatctggaatatggtgctgttttgcatagttttaacggtggtgttgactggttaaataagtttttggatttgaatgtttacttttcatattcaggtgttgtttctttcactaaggctacggaagtacacgagagtgcaaaagctgcgccacttgaccgaattttagttgaaaccgacgcgccatatttaacgcctaagccatatcgtggtcatcaaaatgaaactggctacgtacgttatgtggcagaagcaattgctaagttgaaggatattccactagagaaagtggcggatgctacttataagaacacagtgagagtttatgggcttaaataaaaagaattttgatgcggtaatcgttgttgaggggaaagacgataccatccgtttaaaacaatttttcccaggaatcgagacaattgagactaatggatcagccgtttcagatgaagtattgaagcaaatccaaaaattaagtgagagtcggcaaattattgtctttactgatcctgactttaatggcgaaagaatccggcgcattgtaactaaagctgttcctgatgcaaagcaagcttttattacccgtaaggaaggcgaacctcataaaaaggggagtctaggtgtagaacatgcttcaaaagaagcacttgagcatgcactaagtgatttgcatgaggttgaaccgcaaaaaagtgatttaactccagcaatttatcggcaattaggtttagctggtggtagcggctcacgaaaattacgtgaacaagtaggcattaaattacgagttggctatggcaattccaagcagttttataatcgcttgcatacttttggcgtttcattagctgaattaaaggcagctgtcaaggaggtagaaaatgacaaataatattccaattggctctccagttagaacacaagcaattgttaaccgttactttgtcaaagctaaaaagaacttagggcaaaatttcttagttgatcagactgctattttaggtattgttgaagctgctgggataaaaaaagatgatcaagtcattgaaattggaccaggtattggctctttgactgagcaactactgttggcaggtgctaaagtttttgcttatgaagttgatgatagcttacctacgattttacagaatgaactgcctaagaaaattgatgatcagcctttggctagtcgctttaagctgatcttgaaagatctattaaaagcggactttaaggtagatattagtgacttctttgattttactaagccaattaaagttgtagctaacttgccgtattacatcactacgccaatcatttttgccttagctgaatcagatttgcactttacttcattgaccttaatgatgcaaaaagaagtagcagaacgattagaagcccaaccaggcagcaaggaatacggtccgttgactatttccgttcagaccgaaatgaatgttaaacttgctttgcaggtgagtcataattcctttatgccgcgaccaaaagtagactcgagcgtagttgtcttaacgccactgaaggaaaagccagcaattgaaaatcgtaagcattttatttgggtagtgaaaatgtgtttttcacaaagaagaaagacactcaataataatttaaaagctttgttgcctgataaaactaagcgtgatgaattatttgcggaattaggggtaaatccaagaattcgccctgaagaattaacaattaaacaatttattaaaattgctagctttattcctgcaagatgatgtataatattgaatttattatatatttgtgataaaatgttgctaaaggagctgttgtttagtgccaacatcaattatcacaattaaacataagttggattctcacttaggtgatactttaacagtagtagctcaagcgggtcgtaagaaagttactaagagacggggaattctaagagagactttccctgcagtgtttgtggttgatttagaccaacatcaaaataattttaaacatgtttcttacagttataccgatttactaactaagaatattgcattagagtttgatgatgaagctgaagaggctgaagcttaaacacaatttttgaaattgtcactagcatttatttaaaatgttagtgcttttttttgccctttagagtatattaattaagtataaaccaaacattagaaaggagatttcatgaaacgttcagaaagattggtggacatgaccaaatatttaatggagcgtccccatactttaattgcactaccattctttgctaagcgttacggcgctgctaagtcatctatttcagaagatttagctattttgaagcacactcttgccagcaatcaagatggtattttggagactgtagccggtgcagctggtggcgtgcgctatattccatttttaggtaaaaaacacgcggaagcatatttgtcagatttatcaactaggattgaggatccaagtagaattttagccggtggttttgtgtatctgtcagatattttaggcaatacgcaagatttacgtaaaattggtgaattagtagctactcattatgcttatgaagaaatcgatgctgtcatgacagttgaaacaaaagggattgctttagccaaagcagttgctcgttttttagatgtaccatttgttacagctagaaagcgatcaaaggtaacagaaggtgctactatttctgttaactatatttcttcatcgttgtctcgagtatcgaagatggaattaccgactcgtgctcttaaaaaagaagctaaagttttaattgtcgatgattttatgaagggtggcggtaccctaaccggaatggaagaattagttaaggaattcgatggtactattgccggcgtttgtgtactctgtgaagccgattttgacaaagaaaagctgattaagaactatctttcattagtaaaaattagtgaaattgatactgcccaaaagctgattgtagcagaacctggtaacttcttaactgaaactgattttgaccgtttctaaaatggtatactagaatcaagttttgattattaagaggttaatattaatggaaaaatatgtagttgttcttgccgcaggtaagggcacacgaatgaagtcaaagttgtacaaggttttacacaaagtttgtggtaaaaccatggttgagcatgttgttgatgcagctcaaggcgttaatcctgcagaaatcgttacaatcgttggtacaggtgctggcgatgtagaaaaagtactggcagacaagtctaagtttgctttccaagaaaagcaattaggtactggtgacgccgtaatgactgcgcgtgaagaattgggtgacaaagatggtgctactttagtagttactggtgatacaccacttttcacaactgatacatttaatgaactattcaagtatcatgcagaaaaaggcaatgctgcaactgtattgaccgcggaagctccaaatccatttggctatggtcgaattattcgtgatgatcaaggcaatgttttacgaattgtagaacaaaaagatggtaaaccagaagaattaaaagtaaaagaaatcaatactggtgtattttgctttgacaataaaaaattatttgaagcattgaagcacgttaataatgacaatgctcaaggtgaatattacttaactgatgttttagaaatcttgcgcaatagtggtgaacgcgttggtgcttacaagatgcctgactttagtgaaagccttggcgttaatgaccgtattgcattagctcaagctactaagactatgcaaagaagaattaatgaacagcatatgcgtgatggtgtttcatttatcgaccctgatactgcttatattgatgcagatgttaagattggcaacgacactgtaattgaaggtaatgttgtgattaaaggaaacaccgaaattggtagtgattgctacattactagtggttcaagaatcgttgattctaagattggtaataatgtcactgttacttcttcaactgttgaagaagctgaaatggacgataatactgacatcggtcctaattcacaccttcgtcctaaggcaattattcgcaaaggtgcacatattggtaactttgtggaaattaagaaggctgagattggtgaaaatactaaagtaggtcacttgacttatgttggagacgctaccttaggtaaagacattaacattggctgtggtacgatcttctctaattacgatggtgtaaagaagttccatactaatgttggtgatcatgcctttattggtgctggctcaacattgattgctccaattaatgttgcagatcacgcctttattgcagctgataccactgttactaaggacgttaataaatatgacatggcaattggccgtggccgtcaagttaataagccagattattggcataagcttcctctttctcaagataaagaatgggattaagaataaggcactagtgtatcaagctagtgcttttttgttaagaattgctaaatacttattgcaaaataataattgagacctacaataaggtgtactaataataatttttacatgaggtaggtaatacaatgaaattaagtcataagttagttatggtttcagcagctgttttgatgggtgttagcccagtattaggcatggcagaaaatactgtatctgttcaagctgctactaagagtactaatggcgtacataatacttacggtaaaaacagcaaagtcaaagtaactaagactatgaagtttgtcgaccgtaatggtaagaaaacttctaagactgctcctaagggtggtagctacactatttggaacgtcaagaatatcgacggtcaagtttactacagtattcaaactgatttgaagtactggattcctgcaactgcaactgaaggtacagtaacttataagtcaggcaatactacttatactttaaagagtgatggcaagaaggtaacaacttctacttcaactaagaaggctgttaagaagactaattcaaataaaaacactaaaaaagtagttaaagaatcaactaaaaaaactgccactaagactactaaaaaaagcaactcagaaaagactactaagaaaacttcatcaaagaagacgccagtggctaaggcagttaagataactactaagaataaggcttacgtttacgacaagaatggtaagcgtgtaaaaaactatttaggcactagttacattggtaaaaagatcactgttaaaggtttaggtactaagaccattaatggtgttaaatattatgctttgcaaccaaatcattattacattaaagcttcagatgtaactgttaagtaataattgataggaaaaagacactttttcgtttctaaattggcaaaaaaatattttagatctacaatatataaatgaactttaagtttagtaagaatgaggtatttatcgatgaaattaagtcataaattagttatggtctcagcagctgcattgatgagtgttgctccacttttgggtactgcagaaaacgtcaacactgttcaagctgctcctaagaagactacttcaaagaaggcagcaaacaacaagatcactttggtacgtaatgcttatgtgtacgataagaatggtaagcgtcttgataagtacatgggcagtgcaaaaaacactactattgctaaaggcgtaactgttacttcaactggcactaagactatcaatggtgtaaagtactacgatcttggtggtggtgcttatatcaaggctgttaacgtagatggtaaagctgcgtcatcaacttcatcactgtcaaagggtactaaggctaagtttgtttctaactcatacatttatgacaagaacggtaaacgtatcagcaagtaccaaggcaaatctaagtttgttaagggtgattcagtcactacttacggtattcaaaccattaacggtaagaagtattaccaacttgacaagaagggtactgcttttgtacgaactgttaacattgatggtaaaaccacttcaaaccaagaatcatctgtttcaaatgatgcagaatcaactaaaaaatatgactactcattaaagaagaatgcttatatttatgataagaatggtaagcgcatcaacaagtaccaaggcaagtctaagcttttaaagggtgccgcaattgatgtttatggcattgaaaccattaagggtaaggattactaccaacttgacaagaaaggcactgcttttgttaaggcaagtaatgtaactagaaccgttaaggcaacttcaattaccatgaagaagaatgcttatatctacaatggtaacggtgacaccaagaagaagacagttaagaagggtaagactgttaaagctactgaagcaagatacattggtactaagctttactacaagattggtgataatcaattcgttaaggctgctaatgtaggtaaaatttcaggcccagaactagaaccagttaacgaaccagatggtgctgctactgttgatactggtgataatactgtagatccaaacgtaaccaaggtaactacgattaatgttgctccactttacaacattaagggacaaccagataacgttagagcatttggcgaaggtcaaagtcaacaagtttcagaattgagatatattgcaacttctgcaactgctaccccagaattattctataaattatcaagcggtagaggctatttaaagcagtcagacgttgctgtaagtggtaagattttaactcctgttaacactccagaacaagctagagcagacgttacagttgctacagcagctgataagactaagttgcttcaagacattaacgaagcaactagtgttaagaactcagaagcttacaagtttgcttcaagtgatgccaaggctgcatatgatagggcaattacaaatggtactgctgttaacaacgatgctacagctactattgctcaagttaacgaagcagatgctgcaattgttagcgctaaggctaaacttaacggtaagaaaatcactgtatcaagcattagtaatttgactccagcagaagtaacttcaattgtacaattggttgcaactgctaataatgtaccagaaagttcaattcaactttcaaatagtggtgctttgacaattgttactaatggttatactcaagttttaaaccttagtgattatgttactcaaacttcagcaacttcaactaactagaaatgcataaaataagacgtagtatctgaaaggacactacgtcttattttttaggatattttcgttgtactagaaagtacaaatatattctaacttttttagcgattaatagttagtgcttttttatggttgcggcaaaattcttgctataattaaggagaatgtggttctttttagagcaacttttgctaaaatagagctggttaaatatttttacggaggaaattatgtcctataaagacgatatgatgatcttcgcccttaactcaaatgtaccattagcacaaaagattgcggatcgtgtgggtgttccactttccaagtctagtgttgaacgtttcagtgatggcgaaattcaaattaatattgatgaaactgtgcgtggtaaagatgtctaccttgtacaatcaaccagtaagccagttaatgacaatttaatggaattgttgattatgattgacgctgtacgtcgtgcaagtgctcgtacaattaacattgttatgccttactacggttatgctcgtcaagatcgtaagactcgtgctcgtgaaccaattactgctaaattggttgcagacatgcttcaagctgcaggtgctgatcgcattctttcacttgacttacatgcaccacaaattcaaggtttctttgatattccagttgataacttaatgggtgctccacttttggcagactacttcttgcgtaacggcttagagaaagacgctgttgtagtttcaccagaccacggtggtgttactcgtgctagaaagcttgctgaattcttaggttgcccaattgccatcgttgataagcgtcgtcccaaggctaatgttgctgaagttatgaacattatcggtaacgttaagggtaagcgtgctatcatcattgatgacatgattgatactgctggtactattactttagctgctcaagccttaattgatgcaggtgctactgaagtttatgctagtgcaactcatgctgttctatctggtccagctattaagagattgaacgattcaccaatcaagaatttggttttgactgattcaatcaatcaaccagcagagaagaagcttgacaagatgcttttggtatcagttggtccattgatgggcgatgctattaagtgtatccaaaaccatgaagcacttagcccattgttcaacaccagatacgaagctgacaagaacaagtaagataaaatttgataataaaaaatggctagccgatgaggttagtcattttcctgaattgtcaaattaagtgcaacagttaggctatgaggaaatatattgcttgaagagttcttctgctgtgtgatattgaaggattcgacgatgtttgcggttaatggcatcagttgcctgttgaacataagcagctgacttatctttcatgcttttgcctttagggaagaattgacgcagaagtccattgcagttctcattggtgcctctttcccatggagaatatgggtgggcgaagtagatctggcagcctttgatcttggtcatatccgcaaactcagagccattgtcaaacgtgatcgatttaaaccaggcaggatgtctgtcaatctcattttgaagcagcctttggcatgtgcttgcccgatagtcaggaatcttgataactacttcaaagcgtgtggttctttcggtcaaagtcattaaagcaggctgattcttgcgtctgacgcctttaaccagatctccttcccagtgcagcggcgtttttctgtcttcaatctctttaggacgctgttcaatggaattgccaagatgcttcttgtgcaaagcatgaccgctatggccgtgatgacgcttgttcctgcgtcttttgagcttcataggcagatcaatattgcttatgtccagcaagccctgatcaatatagcgatagacagttggtgtgctgggacaagggtagcctggcatagtccttttgaattcaccaacgaattcatcgatgctggtggcatcaaatttagctttaaagcgtctggagagcattctcaaaaagacagcataatgcttcaatggattgcgctgatagcagtttttgcgacgcttctcataataaatctgtgcagtatcagcgtaatagtgctcatacaataaatagctgctgtctctttgcaggacacttccgcgtttgatttcgcgactgattgtcgacttatggcagccgacttcttgagcgataacagtacgggaagttatgccggaatccagcattgcttgaatttgtccacgttgtacgctggttaattgatgatagtgcttagaaatgctagaatttgaattggtcataaagatcttcctttcttgatttttcgtcacttcaagtttaggtcttcatggcctttttgtttaacacttagtgttgcacttcaattttaaatccgggggttagtcattttatttttttttgaaaaaatcatcaccatttataataaataagagtgtattaaaatacacatgagaaacatctataattagagatagatgtttttcatttaaagaggacaaaattatgacacaatatttatcattcgatattggcgggactaacttgaaatatgcattaattgatcaagaagggcatattcttgaaaaagaccgggtaaagactaatactgaaaacctagatgcattcatgcagacgatgtatgaagtcgctgacaagtatcaaggaaagttcgctggcattgcagtctgtgctcctggtaagattgatactaagaataaaattatctattttggtggagccttgccattcttagatggcttgaatttagaagagactttaggtaaaaaatatgatgtaccagttggcgtagaaaatgatggtaaagcagctgctttgtcagagcaatggctaggcgaattgcatgacgtcaatactggtatcgcaattaccttaggcactgctgttggcggcggtgtcatagttgataatcgtattttacatggctggacttttcaagctggcgaattgagttggatgattacgaattcaagtattggtactaggaatatggctgcttatgctggctttagttgttctgcggttaatatgatcaaaaaagttaacctggctttggggaatatcgatcttgataacggcttgaccgcgtttgaggcaattaacaatggcgatttaagagcactagccgtttttaaacgctattgccgcaatgtagcaatcatgatcctcaatattcaggcagtaatcaatggctctaaagtaattattggtggcgggattagtgcacagccaattttgattgaagaaattaacaatcaatttgataaaattttgcagaataatccaatgttgaataatcaagtgattaagccggtgattgtggctgctaagcatggcaatgattctaacttatatggtgcactttatgcattactgttggaattaaatgacgaagaagttaggtaaatattgcaacacaaaaaggggatgcgtcgcatcccttttttacatgagctaaataataatttaatctttgccagaaacaatcttggcaatcgcaatgctggcaccagcaacgcaagctaccatggcggttttacaaccaatcttgactacgtcttttaccaaatccttattttcatgaatgaagtcaaaagacattttagtatagtccatgcaataaccatgaactgtgtccatcaagtctttaacttgagtatagccactcttaggttctgcctttacttcatcttctggattaatttgagttcttacatctgtatttaaatcatttctgttcatcataaatacctcgattctaggatttaccttaattttacttcttttgctcacgttttggtcttctcaaatatcttaaggcaccattcttaatatatttttgaaattgctcataaagtggatcgaaaatttgcggctgatcttcatcgtgactgagcatagttttagggaagaagaagcgttcatctccttggaaagtaccatttaatgcgcgaaccaatgggctgagttgggataactcaatcatgctgccgtcgtcttgcataatttcaatttgactattagcatttttccccgttggcttataagcatcatatggttcatcgaatgcggaattggtagcggtatagtaatcaggattaaagccagcttgcttgattaggctcttgagcttaggtaaaagatttttggtttcttcatcgattcggacactagctagcggttttctgtacaagtaacgcttggctaggtcagataagattggatcttgtgcctgggtccacatagaaaaattagtttccattactccatcatcaagctttaaataatcgtctaaagtccaattgccttcaaggaatttagtcaagctaggtgtaacttgcagatttccctttttataaacagtttgagcgcgctctaaaaggtgatgcaagatgacttccattgagcgtcctacgcggtggaagtagacctgttggtacatctgatagcgtgacacgatatagtcttcaacggcatgcatcccattgttggcaaaacaaataccattttgataaggacggattacccgtaaaattcttgataaatcgaacctaccatagttaactccggtgaaataagcatcccgctgcaaataatccatccggtcagcgtcagcttgacttgagatcattttaaccacttgcggattaggataagtcttagcgattacgctggcgactaattcaggaaagttaggtgcaacttgttttaatgcatggttaatttctgtattaggatcagtaatgatcttttgtccaattttttcatgattggtgccaaaaaggtgctcgaatgtgtgcgaatagggcccgtgaccgatgtcatgaagcaatccggcacattctaccagtaatcgattatcatcgttccagagaccgtctcctggcgtaattgagggatattttttgctaaagatatcgcaaattcttctcgttaattcataaacgcctaagttgtgctcaaatctagtgtgagttgcacctggaaaaacatagctaacaggacctaactgtttaatgcgacgcatgcgttgaaattctttagacttcagtatgtccaaaacaactttatcttcaatatgaatatagccgtgaaccggatcacggagaacaacctcttgttttaatttttcgctttgaaatcttgtcataaaaatccaccaagtttaatttattaattttttgaactatatataataaaatagattatatctaactaaaattatatcagagatatagtaataatgtttaaagggggcgcttgtttgacagcaattacgattgatttgactagtaaaattactcaagacgatgagacagagacttttacgcgacatgcgcaagggcaattgactgaagaaggcgacgtcacacgaatttcttatgccgaagaagggcaaattccagtgaagatgcttctaaaggagaatgaattgttgattcgccgcggcgttgacagcaataattattctttaatgaaatttattccgggtgaaaaaggcaactgccgctatgtagttgaagggcgccgcatggacatgaccagcgtgactaacttgcttgaatatcagagtcaagatgatggttcacgtaaacttcgggttgaatatgacctctttaatggactatacttaataggtaactatgcagtcacgttgatttttacttaaaggcctagtagaatagtaaagattgtataagagaggacgtacagctgtgggattagacaaatttaaagacaaaaatcgcgatgaattgtcaatgatcgaagttgctcgtgcaattttggaagacaatggcaagagaatggcatttgccgatattgttaatgccgtacaaaaatacttgaataagagtgacgaagaaattcgtgaacgtttaccacaattttatactaatatgaacactgatggtgaatttatctcaatgggtgaaaatgtttgggcacttcgttcatggttcccatatgaatcagttgatgaagaagttaatcaccctgaggatgaagaagacgattcacgtaagcaccacaagaaggttaatgccttcttagctagcgctactggtgatgatgacattatcgactacgataacgatgatccagaagatgacgacttagacgccacagacgatgatactgatgatgtattgccagatggcattgaaggtcaattgtcacaattaaatgatgatgatgatgatgacgaagaagataattaatttgcttgacttaagaagaaaaagcagataatatttttgttgggcaccctatgtgcgtttagctccccgttagtgggagcttttttgtttaaaggataagttaaaaggagcagaacatgacaaaatacatcttcgtaactggcggtgtcgtatcttcacttggtaaagggattactgcatcaagtttaggtcgacttcttaagaatcgtggcttgaaggtcactatgcaaaagtttgacccatatattaatattgacccaggtacaatgaatccataccaacacggtgaagtttatgttaccgacgatggtacagaagctgaccttgacttaggtcactatgaaagaatcgtagatgttagaactagcaagtattctaacgtaactactggtaagatttaccaagaagttttggaaaaagaacgtcgtggtgactaccatggtgctactgtacaagtaattcctcatattactgacatgatcaaaaagaagatcatgcgtgcagctttgactactgattcagatgtaattatttctgaaattggtggtactgttggtgatatcgaatcaactccattcatggaagctattcgtcaaatgcgccgtgaagttggtccagaaaatgtaatgtacattcactgtactttggttccacttcttcacgctgctcatgaaatgaagactaagccaacacaacactcagttgcggaattgcgtagtattggtattcaaccaaatatgctggtacttcgtgctgaacaaccaattgaccaagaacacaaagacaagatttctacttttacagacgtgcctgttgatcgaattattgaatcaattgatgctccttcattattcgatgtgcctttgaacttccaaaagcaaggcatggatcaaaaagtctgtgatttcttacacttagagagtccaaagccagaagctgacatggaagcttggaagaagcttgatgaacgtgctaagaccttgaagcatcacactaagattaccttggttggtaagtatgtagagcttgaagacgcttatatttcagttactgatgctttgcaacatgctggttatctttacaacactaagattgatgttgataaggtacaagctgaagacgtaactgaagataatattgcagaaatcatgaaggattcagatggtttgattgtccctggtggttttggtactcgtggtcttgaaggaatgattactgcaattaagtatgctcgtgaacatgacatcccattcttaggtatttgtttggggatgcagatggctagtgttgaatttgcacgcgatgtattaaaccttgaggatgctaattctgcagaagcagagccaaactgcaagaataatattatcgacattatggctgataagcgtgatgaagaaaatattggtggtactttgcggttaggtatttacccagctactcttaagaagggaactaagactcgtgcggcttacgatgatcaagatgttattcaagaacgtcaccgtcaccgttttgaattcaataatgaataccgtgaagcctttgaaaaggctggtatggtcttctcaggcgtttcaccagataaccgcttagttgaaattatcgaattaccaaagaaaaaattctttattgcagcacaatatcacccagaatttttgagtcgtccacaacgtccagaaggcttatttaagtcatttattggcgctgctagtggtcttccagcacaagaattttaaagtgattaaagtttgattatacaaaatcttaagaaaacaagaactgagagacctcagctcttgttttttttgtaaatatcctttaacattattatgattaattgaaagtagaaaaggatttgttttcgccaatgaagcagatgataattcatggtggaaagcccctgcagggtgatgtttggatcggtggagctaagaactcaacagttgctcttattccggcatcaattttatcaagaacaccagtgaccttggaaggcgtcccaagaatagctgatgtagttaacttgatggacttattgagtgagatggatgtacattgtgatttcggtgaaaccactttaagaatagatccaactgatatcaagatgagtccgttgccagctggtaagattaagagtttgcgcgcttcatattactttatgggtgcgctacttggtcgctttggcaaggcagtagtgggcttccctggtggtgacgatattgggccacgtccgattgaccaacatattaagggctttgaagccttaggcgctagcgtaaaaaatgaaaatgatcaaattataattactgcaccagaagatggtttgcatggagcaaaaatccatttaaagatgccatcagttggggcaacgatgaatattattatggctagtgtgacggcacagggccagactataatcgaaaatgccgcaaaagaaccggaaattattgatttagctaccttcttgaacaatatgggggcagttattcgtggtgctggtactgactctattcgaattgaaggggtggagcagcttaaagcacagattcctcatacgattattccagacagaattgaagcagggacttatgttgctttagctgcctgtattggtaatggcattcgcattcataatattatcgaagaacaccttgattcatacctggctaaagttgaagaaatgggtgtagtaatcgattcagatgaagattctttgtatgtttacccagcgggcgacctaaaaatggtccaggtgaagacagatgtttatcctggttttgcgacagatttacagcaaccaattacaccacttttattaactgctaaaagcggtgaaggtgtagtaatcgataatatttatcctaaacggattggtcatattgctcagttgcaaaagatgggagccaatattaaagttgaagataatattattttggcccatccaactaagcagtttcatggtgcggaagtaactgcaggtgagattcgagcaggtgcctgtctgatgattgcaggcctgatggctgatggtacaacaacgatcgacaaggctggtaatatcttgcgtggttatgatcgggtccaagaaaagctgcgtcaacttggagctgatgtaactatcaaggatgatcctgctgtaccgggtattttagataatatttagtaaataaaaaccacatggaaaatctccgtgtggtttttgtaatgatatgtcgatttgtaggtgaacaaatgagtttaatttttacaagacgtgcacaaaattcagatgtggataaaattgtgcaaattttaaatgatgcgacttcttttttaaaggaaagtggctcatcgcagtggcaaagtggctaccctaatcgagcaactgtagaagatgatattaaaaatgggtgtgcttgggtattaactgtggataatgaagttgcaggttatgcggcagtggtaattggccgtgagccaacttatgcggatattgaaggcaagtgggaaaataatgtggacacctatgcgacaattcaccgcattgcagtttctagtaagtttagaggaatgcatttgagtcaatttttcttgagcaatattatttctctaacttatgcacaaggaattcacaattttagaattgatacaagccggaaaaataaaattgtccagcacattgcagttagtcataattttattgaacgagggattattcaagtaactgaagatccggttgattcaagtagaatagcttacgagttgaatttaaggtaatgaaaaaccacatgggatgtgaattccatgtggattatttttttgctttatttattaatcaagcaagtcgtatttcaaagtcattaaaccatgaccttcgtcaaccatttgaccaagcagttcaacagtgttgttataaactgtatcagacatcttttgattagcagcaattaacttgtcttgtaattccttacctgaaaggttctttgcttctttgtcagtatcatgttggatcttgtgacattgtgctaaactcttttgttcaaaggcgtcttcaagttcaccgtaaacacggtagttggtatcgcctaattgagcagttaacttgttaagccagaaaatcttgctcaagttaaacttaggagtggtttgccaagcttcaggggtagtagtgatattagtatagaatggcaccattgagttaaaggtgttaggaccaaaggctaaccattgtacacctgcaatttctgcaggaacatcattacgaatttgcaaaatatgggtttcaaagtttctgttaataccgataggacggaaggtcttcttttgttcaggagtaccttgatcgccataagcatcgtaaggagtgtcttggtagtgtgagctttcggcccatttaatatcttcaattgagattaaacgattagcatggcagataaaaggttgatcttgatctgctggagtaccaccaaagtctggatcgaaatagttgtgaatataccaagcacgaggattattgtagtgagcatccttaatagttgaagaaccaaagatgtggcgcatgttgtagccttcacggtctggattcaagtgatattcttcgattaaatcctttaggtctgctgaacaagcaaaattatcagaatcgttgaagtcgaaagtatcaatattcaaacggtttggtgcaataacatatgcatcatctgggatacggcgtgcaatccaatgatgaccaccgatagtttcaaggtaccaaatgttatccttatcagaaaaggccataccgttcatttcataagtaccgtatttttcaactaaatagccgacacgtttaacaccgtcaaaagctgagtgcaagtatggtaaagtcaaagtgacgaaatcttcttcaccaagaccaccttcacttggatcaagtaatgggtcaacaccttggatgcgtgaattagtagtgatggtttcagtagcggtcatggctacattttcagcgttaattccagctgcgccccaaataccatttttgcctgaaacatcaggtgctgaagtatagcgtaatggtgtttctgctaaatcagcgtcgtcaatcttttgtttagaaattacactagtgtagtgcttaggttggtcagctgggttaacagctttaaagccttcagggatgatgacgcgaccaccgtcttcactacgagcgatcatcgtagagccatcaatagttgcttttttaccaactaaaatagtagtacattctgtttgtttcattggatcattcctttacttttattatgtttaaattatttcctaataatattgtatgcaaaaataatccgataaggcaaagaatataattaatttccccgaaaggcatttggactaacaccgctatagcgtttaaatgccttggagaaggtaaattcatcgccgtagccgactttttgagcaacttgccttagattgtgcttggtattaattaattcttttttagcggcttccatgcgcaattgcatgaggtacttttgcggcgataatttagtgttttttctgaacaaagcatataaaaagctgcgtgatactcctagcctatgacaaagttcaacaatattgcaggtaggatcggtataattttgattaagataattaatagcgatttgatattgatcatttttaggtgttttgcggactggtggatggttaggaaagtcttttactagatgataaaaaagttgataagttaaagctgaaatttttaaattgtttaataaggtctttttcttcgccaaacattgataaaggtcatctagggtttgataaaaggcagttttttgaatttgacgcaagaaatttttattaggtaaatttgatgccttgatgctttcattaacgccgttgccagctaggccaatccagaagtattcccagggttcattgtggtcagcttgaaaggaacaagtttgactgcgtggaacgtaaaaaagatcgccagcttttaatttaactgcgtggtgtctactagaagtaaaggtaccagttccgctaataatgtaataaaaaatatcgtttttacgaagattgtcaccttgaaagaattcatcgggctgacatttttgtcgaccataaaacatgatgtagctatcaagattttggttatttaagttaggcatagacttcctcactgttgaaaaattatgttacttctattatagaagagattttgcttaaaaggtgaagaatgaaaaacgaccacattaagcgaaactgtcaaatcttttgtgtaaatagttctttctcgcaaattgattttttaattatttattcaaaataagattctaaggtatcctgaacctgaccaaagcctttatgaattcggttgaaatagcggtcattgtagctcattgcctggatgccaataaatgcatcaagcgactgttcagttggaaattctgccttaggcttagctttacgcttgatgacgttgttaaaggattcaatcatattggttgaataaattgaagctctgatttgtttgggataattgtagaagaccagcagatcgggctcaatttccttcaaacctttgatgacattgctataagctttattccatctggcatagaatttgtgcaagacagctgcagcttcttttttgcttgtctgttgatgtatctgcttgaattcgttcatgatcttttcgcggtcatccacccggactttagcacagatattgcgcatgacatgaaccaagcagcgttgaaaatgagctttaggataagtcctggccaaggctgttttcatgccaacaacaccatcagaaagaaaaagctcaacttgctttaagcctcgggatttcatgttttgaagcatatctgtccagacttcaatgttctcgctaggtgcaatgcagtagtcaatgacctccttgtgcccattaggcttgatgccaatggcaatatagactgcttcacgctcaaacgtttctcggcgcaaaggaaggtatgtcgcatccaaatagacacagaaaaacttgtcgcttagcttgcgcttgtgataagcctcaaccttggggagcatctgcttggaaatatttgatacttgagctggactataatgactgccatacattttctcaatcaagtcagcgatttctctggtagttacgcctttggagtagagcttgataatcgtgctttccaaaacatcagagtgctgcttgtagtcaggcagcgtgtgctgatgaaactgaccgttgcggtctcgaggcacttgcacttcaattggtccaaactgggtatcaaccttgcggaaataagcaccatttctagaattgccagtattccagccatttctggcatagggatcatagcctagaaaggcagtcaactcagcttctagcaagttattaacagcctgttgtagctctttgcgcaataaatcatttattttgtctggattgaatagagcttgagcaaaatctttggtaaaatcattcatgaaggagttcttctttctgtatgtgtttttttgttcaaaccaatcatacgagaaaggaactcctttttctaatgtttaaagaaacaaatttaaggaatcattcatccttacacaaactattttacagtctccattaagcggtcgttcgtgaatatttatagaaaattatgatatggaattatgaaatgaaaaggtattttacttattggcaccacttcttccattgaataaaagattaagcagagttgcacagatgctggctacgacgataccgttgcctaagaacaattgaatggtttgggggagagtttggaagatttgaggatagacagtaacgcccaatcccatcccgattgaaatggcgacaattagaatattgcggttgttctcaaaatcaactttggttaacattttgattccttgcacggcaatcattgtgaacatgaccaacatggctccgcctaaaactgagtcaggaatgatggtaactagagcaccgattttaggaagtaagcccatggccattaataagccagcagcccagtaaatcggacgcttagtcttaatgccggataattgaagcaagccgacattttgagaaaaagtagtgtaagggaaggtgttgaaaagcccgccgaagatttgtgctaatccttctgcacgataaccttttttgaggtcttcttcggtgatatcttgatgaagtaggtcgccaatggcaaagaagacgccagtggattcgaccaaggaaactaaggcaatgatgatcatggtcaaacaagatgaccattcgaattctggcaccccgaagtagaaaaattgaggcaaatggaaccaagaagcttcggcaactggctttaatgaaacaagtcccatgcagctagcgattagagtaccaacaattaatccaattaaaacggaaatggaacgtaagaatcctttagcccagacttcaatgacaacgatgatgaggatggtgataaaggcagcaataagatttttcgcatcaccaaagtccttggcttgggcatttccgccacccatgttttgaaaggccacgggaatcaaagttagtccaataactgtaattaaggtcccagtaactactggcgggaagagttttttgatttttgaaaaccatccggcaattaagaaaacaaagattccagcaacgataatggcaccatacatcgtgttaattgaaaacttctgcccgatcatttctaagggagctaccgcttgaattgcacagcccaaaacgactggcaagccaatgccgaaatatttattacggaatagttgaattaaagtggctaaaccacacatgaagatatcaatcgaaactaggtaagtcatctgtgtgctattgaagtgtagtgccgtaccaattaaaaggggaacggcaactgcaccggagtacattgccagcaaatgctgcaaacctaggacagcagcttttttgtgactaacttctttttgtgccatttttaattattcttctccctcgaagtgtacttgatcattttcaaagctatcgatttttgctagggcttcaaagcgtaagccttcgttttctacccattcgcttccgccttggaaggtttttgcaacaacagcaccaactccaacaatgtcgcagccggcttgtttagcaatgttaaccatgcctttgactgcttcaccgtgggcaacgaagtcatcgatgattaagatatgttcgcctgggtgcaaaaatttctcttcaacgcagatcttattgttgaccttcttggtgtaagaaaagacgtcagcccaataaactgcatcattcaaagtagacggctttttctttctggcaaagatcattggcacgtgcagttggtaggctgccatgacaccaggagcaatcccggacgcttcacaagttaagaccttatcgactttttcatctttaaaaaggcgggcaaattcttcaccaacatgcatcattagttgcggatcaacttggtgattcaaaaatgaattaattttaagcacatttccaggtaaaacttcaccatcttgtttaattcgatctactaattccttcaatattattctcctcaagaaagaaataaggacttcttctacctaaaacaggtaaaagaagtccttaagattattcttaactttcattcacctatagtccggtatttacggtaccgggtagagactgtcgaccttatttcgacgatatatagatatttgtgttggcttaatcttaacagaatatattgccgaacacaagtggaaaattaaggattaatgttcgattatagtaaaaattattcagctgcgatatcgttatggcacagactgatgatcttttcgataatgccatataagatccccgcgattggccagatgatccagctgcgttcccaatcattggtaatgaagctatatcctagataaagtaagactgctattaaccaatagagtgtggcgtatttgttcataatcttgcgacagccggttaattggattgttaaattgcccaggtcaagcataatagctagggcagtagaaaagcaaaggatggctggactgcgaataattaaactaatggctaaagcgcgaaggctggcacttttttgagcagctgttaagtagccttgctcttgttgatcagataaaattggcaattcttcagttaagttattatctttgtggtttaattcaaaagaaggtgagccgcttttgagtaaataatcggtggtcactccaaataattctgataaagctacaattttttcaatatcgggaattgattgttcactttcccatttggatacagcttgccgactgacattcatcttttcagctagtgcttcttgaaaaagatgatttttcttgtgtaatgccgcaattttttgacctaatctcatgattgatcgtcctttcgttttgaaataatttgatttaacgaaaatttgcggttgcagaccaccactttttaattgcatttagcgcaactagtagttgcaactgctggttgctcaagataaaagccgaacaatgaatggctatttttaactttttgattgacctttttaatttttcctagtagagttagttaaaaatgcgtaattgaaaagagggagtaaatagtggctaagaatctagacgattttgataaaattattgtgcttgacttcggtagtcaatataaccaattaattacccgccgtattcgtgacttcggcatctattctgaacttttaccacacgatctttccatggagaagattaaacagatcaatcctaagggaatcattttctcaggtggtcctaacagtgtttacgataatggtgcattaaaggttgatcctgcaatctttaagttggatattccaattttgggtatttgttacgggatgcaattaatgtctcatgacttaggcggtaaagttgaacaagctgaaaacaaggaatatggccgcgccaacattacggttgaagatccagacagtattttgttcaatggcttgccttcaaagcaatacgtttggatgagtcacggtgatttggtaactcaagctccaaagggcttcgaagtaactgcctcaagcaaaaactgtccaattgctgcaattgctaatccagataaaaagttttatggcattcaattccacgcagaagtgcgcaattcagaatacggtttagacatcttgaagcactttgcttttgaggtttgtggtgctgaggctaactggaccatgaacgacttcatcgacatgaaggttgatgatattcgtaaggaagttggcgacaagaaagtcatcttaggtctttcgggtggtgtagattctagcgttactgctactcttttacacaaagcaatcggcgatcaattaactgcaatttttgttgatcacggaatgctgcgtaaagacgaaggcaatcaagtaatgcaagccttgaacaaggatcttggtgttaacatcattcgggttaatgcccaaaagagattcttagacaagttgaaaggtgtaactgatcctgaaaagaagcgtaagattatcggtaaggaattcatcgaggtctttaacgaagaagctaagaagttaaaggatgtagatttcttagctcaaggtacgctttatactgatgttatcgagtcaggtaccaacactgcccaaacgattaagtcccatcacaacgttggtggtcttcctaaggacatgcatttcaagctgattgaaccactgcgtaagttgttcaaggacgaagtacgtgaacttggtgaaaagctgggcattccacatgacttagtatggcgtcagccattcccaggccctggtcttggtatccgtgttcttggtgaagtgactgaagacaagcttaagattgtgcgtgattctgatgcgattttacgagaagaaatcaagaaggcaggtttacaagaaaagatctggcaatacttcactgttcttccaggtattcgctccgttggagtaatgggcgatggacgtacttatgactatacgattggtattcgtgccgtaacctcaattgatgggatgactgcagattttgcccaaattccatgggatgtacttggtcacatttcagatagaatcgtcaatgaagtagataacgttaaccgcgtagtttacgatgtgacgagtaagccaccttcaactattgagtgggaataatttcgtaccttaataagaagagaaaatcccaatatgacggcatttgaatagggtcaatattagtggaaagtaccggttgaaagcaagttgtctaccgtttttctaccggtagaagttgattttaatcagcatgaatagtgcattaaacgctactattacctgttcgttattttggggttgtctaccgaaaattgaatattttgcttacttttgttgaaaagtaagtgactgttgtcctacttattgtcatttgataagtggggcattttttttctctttgttgccacaaaagaaatgctgaaatccaaacggagcagtctgtttgatcgttgttgttacttatgacgaaaacataagtaaatcagatatgaaatctcgaaatgaccttgaatgaaatctcaaggtactcattctcgaatgcaatatctgatcggtcgcaaccgaaggctgaaaatttattttgccgggacggcaaacatgagggggtcattgcacgatgaagccgttaaaggatgagctaattcaaagtcgacttgatgaagatgaattagcagattttgataaagtgaagaaactgctcgatgtgaagagtaattctgttgcaattcggcagatgattaaagatgaaatgagaaagccagaaatgaatggaagcaaggtaatactgacgttgtatcagcgttattaaccaagctgtctgctgaaggtcgcctaccattgtcagaggcgttgatgggtattacaggtactaaaacatcatcacaattgagtatcttacaaaatcagttcgccgatattcaatcacagttagaaagtattatgtattcagtgacaaaaatggtcgattgaacaagtggctcatgtagttagaatcgcctacaagaccatctacaactggattgagcaaggagtattggatattggcgtggctgatttacctgaccatggaattcgccgccgacgagccaaagaaacccgtgggacttttagccatggacgttccattgaagatcgtcccgctgaagttattgaccgtcatacctcaggtcactttgaagcagatacagttttatctggaaagcgtaaaggtcaagcaatagctacgtttgtcgagcgtaagagtcgtcttatcatcgttaaacggcttcagggacgagatagtacctcaataaccaaggccattttagaattagctaaccagttagaagataatctcaagccccttactgttgaccatgggaaagaattcgctaactacaagctaattgaaaagcaggccaggattcccctatactttgcgcatgcttattctccacatgaatggggcagtaatgagaatcgcaaccgagtactacgacgctttatcccaaaggtcaaccgattgagaaaatcactgatgatgagttaattcaaattaactggtatttgaactccaggccactcaaatgtttaaactggcgcacactaattgagatctttttgcgtaatctgcgtcactaactttgttcaagttatttcttgcaatctgccgtttgaaaagagattagccttggcggttagtctcttttactatctggtaagttgactgcaaacagaaaaaagagccaagccgtcatcaaagtcgctaaaccgtgctataatgttgtcggatttaaaaataccactagttattaaatttgggaggcaaaaataacgatgaagcaacttaaatttttagaaactaagcggacaccgcgttatagtttgcgtaagtttagcgttggtgtggcttcggtattattaggagtaaccatttttggaattaactttacaaatcattctgtaaaggcagcaaccatagaaagcgttaaaacttccaatagttcaccagagacgcaaggtagtgcaagtaacaatgcaacagctaataattctacagaagctgcgacaaccccacaatcttcaccagaaacgcaaggtagtgcaagtaacaatgcaacggctaataattctacagaagctgcgacaacctcacaatctttaccaaagacgcaaggtagcgctcacacttatattagatcattagcagcaagatcagcagcaagattagcagctacgaattttatggtaacttctggttctgacagaaatgcagcaggtacagtagatcaaaataacattaatactcagctagctaaagaaaatcaagaattggccaataaggctaatctaacttcttcagataactacagttctaatatctataaaggtacagatggaaattattacaagattgtaactatttatggtcaggactacgtttaccgtgctgctgatattcaagctagtggtgctgattttaagggggatcctaaacaaacagctgaagatactaaaaataatatcaatatttctaaagaagatttaggaaatggtaagacccgttggaaggttgttttcttccctaataagggattacaaaatgttggcagtaaattaagtgggttaagttctgcaaaatttggtattgccctcacttctgactaccaaatcgttggtaatgttgacatgaaagtaattagtaatcctaatcaaacatttgaatcttatacatttgagcccggtagcactagcgctactgaatttccaatacaaaatctaaaaactgaaaaagacttttcatttaatcctaagacagatgttgatccaaatactggtttaattaatagtgaaaccatgccagcttataacaatcaatatttgcaaggcccatactatttcactactgctactgatgttggtgctaagaacttatggcagacttactttaaagatgctgatgaacgtaagaatgcatatgatgggtccccttatctaggtggcaatcatgactttcattttaatacttttaaaattgcaaatgaaactggagttgacggtgcaaaatataaagacccaatcatttatgacaaactggggtataggttaaattctaaaaacggtgtagctaattctaatggcgtatatagcagtgataactttaaccaagcaatgtcatttaagtcacaaggtgtcactagtaatgcacaattttcttcttatgttatttcctttactacgcaacacacagactctcatgaagtagaattaactacaggttcgaaaaatcaacaattctcaggaatcgcagctaatatttattcttatcagaattggtactatagcatgatgtctagcttatatggtgagcagagagcactggatccagctggtgcaccaaaaacacctaaagatgttatttctggttgggttgatgccactagagctctggatgagattaagaaagactatttaaataatgctcaaattaatgttttgcggaataaaattctaaataacattacagactctgatgctgtaaataacattattaaagaaggaaattccttaaacgatgctatgaaaaatcttggtaatagtatcggacagtatgatcctgatggcagttttgctgatcacaaggaagatacaacaaagaaatctgatcgctataaatacgcaagtccagataaaaaggcagcttatgacaatgcaactgaagtaactaaagctttgattaacaaagatacaggtacctatgcagatcaagcgacggtagaacagcttactaaagatgaaaatgatgcttggaacgaacttaatggtgtcaagccaaaggataatgaggttaactctccggtcggtggtaccattactattgaaaagggacatgcattagattcaactgatgccgctaatgcaattaccaataaggatagtttgactaatgtaaaaagttattcttggtcgggtactccagatacaagtaagccaggatctattagtccaaaagtaatagttacatataatgatgatagtgctgatgaagtacctgtaactgttaaaataaaaggcgatgctgacaagtacaagagactgtaaaatagtttgtgtaaggatgaatgattccttaaatttatttctttaaacattagaaaaaggagttcctttctcgtatgattggtttgaacaaaaaaaacacatacagaaagaagaactccttcatgaatgattttaccaaagattttgctcaagctctattcaatccagacaaaataaatgatttattgcgcaaagagctacaacaggctgttaataacttgctagaagctgaattgactgcctttctaggctatgatccctatgccagaaatggctggaatactggcaattctagaaatggtgcttatttccgcaaggttgatacgcagtttggaccaattgaagtgcaagtgcctcgagaccgcaacggtcagtttcatcagcacacgctgcctgactacaagcagcactcggatatcttggaaagcatgattatcaagctttactccaagggcgtgaccaccagggacatagccgatctaattgaaaagatgtatggcagccattacagtccagctcaggtatcaaatatttccaagcagatgattccaaaggttgaggcttaccacaaacgcaagctaagcgacaagtttttctgcgtctatttggatgcgacataccttcctttgcgccgagaaacatttgagcgtgaagcagtctatattgccattggcatcaagcctaatgggcacaaggaggtcattgactactgcattgcacctagcgagaacattgaagtctggacagatatgcttcaaaacatgaaatcccgaggcttaaagcaagttgagctttttctttctgatggtgttgttggcatgaaaacagccttggccaggacttatcctaaagctcattttcaacgctgtttggttcatgtcatgcgcaatatctgcgctaaagtacgcgtcgacgatcgtgaaaagatcatgaacgaattcaaacaggtgcatcaacagacaaacaaagaagaagccacagctgtcctgcatgacttctataccaaatggggcaaggtttacagccatgttatcagaagcttgaaagacatagaaccagatctgctggtcttttataactatcccaagcagatcagagcttcaatttattcgactaacatgattgaatcatttaacaatgtgatcaagcgcaaagctaagcctaaggcagagtttccaactgaacagtcgcttgatgcttttattggcattcaggcaatgagctacaatgaccgttatttcaatcgaattcataaaggctttggtcaggttcaggacaccttagaatcctactttgattaaataaataattaaaaaatcaatttacgagaaagatctatttacacaaaagatttgacagtttcggaaaaaatcctaatgaagaaacttaatatattttattatgctaccatttggagttttattattggaatatgctgtgctacatatttaaacttaattaattttattattaattttgtctggcatgttttgtttgataaattacctgttcctagtcaggctttaccgttttttatttgtattccttttggtttcattattggtatattaattaagcgtttaggatcatatccattaactatcgaagaagttttaatgagtgttaagcaggagggaaagatcaattatcacaattggtggaaatccttaaccttaggtcttatttctttagccgcgggtggcagtattggaccagaggcttcaactactgtactaggaagtggcatggttaattggctgggagatagattacgactaattgcttattcttctgattggaaatggaatcatttttgggatactatcgtttcgaaaaaacaactaaaaaaactgccaaaatttagtagcctttttaaatcaaaattgtatcaaaaagttttttgcttaattatggttatgatcggcgtggttggtgcagcaatagtctttaaattattccctgaagaaggattatttggtattcatcatcgccatattctctggcaatggcgctatagtatgtatgtaattattctattaattgtaggttggagcttcggtatgtttttcttatggagcgaaaaatggagtgattattttgctaaaaaaattactatttcaccgattattaaagcaactatatggggaatagttcttgcattacttaccttaattactagttatgccctgtattctggtgaatttcaaattgttccatttgtacaccaggcgttgcaaatctcaccattatttttgctagttatagcagtcatcaaaaccttgtctactaatataggttttagtttaggctggcgtggtggaaaaattttcccttcgatttttgctagtgtagcagttggcgcagcgattgcgcaatttttaccaattatgccagttatgtgtgtagccattacagttagtgcaagtattgcagttatcttgggtaaacctttattaacagctattttattgattctgttattaccaatagagttggctcctgtcattttagtaagtgcgtatttatctgcctgtttgacaaaagtgagctatagttttagacaaaagaataattagggaggtatttttatgaacgaaaaaaacgatgcagtaactggtgcttctttgatagagaatcaagaagaaaaagtaaaaagcccatggccgggtcctaaaggtatgattcctgtaacaagtgggcgtgctgacgatgctaatgtacataatcgtgcctacttagacaatatcttggtggagatgcgtttgcttgattcagttgagccagacttaacaactgagatttttggtaaaaaatatgcctcacctttaactctggctgcagtctctcatttgaacagggttttaccagataagacgcgtaagccaatgcaagaaaaggcacgtgcggctaagaataccaatactttaaattggattggcatggagtcaaacgaagaatatgccgaaattgtcaaagagggcggcgatacagttagaattgtgaagccttacgcagaccatgataaaattatgggcgaactaaaacaagcagaagaattaggtgccgtagctgttggaatggatattgatcatgtgcctggtgataatggtaaatatgatgtagtcgatggtattccactaggaccgatttcatttagcgatcttgaaaagtatgttcatgcagttaaactgccgtttgtggctaagggcgtgctatccgtgcgtgatgccgttaaggctagagatgctggtgccaaggcaatagttgtttcacatcaccacggccgcgttccatttggcgtgccgccactaaaagttttgccagcaatcaagcaagcactaaatggcagtggaatgaccatttttgtagatggatcattgatgactggctacgatgcatacaaggctttggccttaggcgcagatgctgtactgattggtcgcgggattctttctgaattgttaaaagacggacaaaaagcaacagaagataagattaagaaaatgaatgagcagcttgcacaaatgatgttatatactggcgttaaagatactaagtcatttgatcctagtgtgttacattttgattaggatagaaaaatgaaatagtttattttttacagtttactataattaagtggctattagcctataataaaggcgtttaaagctatactgaatagtgttatgcttaactcggacgttgttataaggtaattatttaaaagtaattagttgtatacgaaaacatgcttagctatggtaaaagctaagcatgatgtctcataatattgagccgcttgtagattatactacaagcggttttattttagatgaaaataacaagttttcaaaaagtgagtatctatgttttgctattatggaaatggattgatttagaaaatgatgctattgaaatttcattatgagcggggatgcaaaaccttttttaaaaagcataagaatgagcaaaagataattaagcagttaatcgatcaagcgattactaaggaattggcaactggtatgactaaagtgaagatcgctgcaatgactcggattaagggaaaatcaatttacgagtttcgcctaaatttgaaaaaagcgggttcagcgagagtcgcttttgcagtaaaggatgagcaagtactagttcttttgattacctctaatttacagaaggatagttttagtcatgaattagaaactgttctgaaaggaagtcattatgcgtttaattccaattaagcaggcagagactttgctcaaaaaaatgtgtagtaataaaagtaaatatgtagaaattaaattattaacggcaaaaaaggatcgttcaattagtgtgaaaaatgatggtaaaaagctaattttaactgaagatggctatttgaactttacgcaggaatatgaattgactgatccagctgttggccgtcatgcagttttagcggcttttaaaaaggaatttccgcgtagtaatcgtgcatatctgattgctaaatagtatactttaactataagaaaaactatcagtgttgattagaaaggaagtctttttatcaatgaaatatgcagaaaaatctcccgcattatgggatgccattcatcatgaagaacagcgccaacaagacaccatcgaattaattgcctctgaaaatattgtttctgatgcagttcgtgaagcacaaggttctgttttaactaacaagtatgctgaaggatatcctggtcggcgttattacggcggttgtcaatatattgatcaagttgagcaactggctattgattatgcaaaaaaattgtttaacgcaaagtttgctaatgtgcagccacactctggatcacaggctaacatggcagtttatcaagcacttttgaagccaggtgatgtcattttaggtatgggcatggatgctggcggtcacttgactcatggatccaaggttaacttcagtggtaaggaatataagtcttacagttacggcctaaatgttgagactgaagaactagattttgatgccattcgtgaaattgctcttaaggttaaacctaagttaattgtagccggtgcttctgcgtacagccgcatcattgattggcaaaagttccgtgaaattgcagatgaagttggggcatacttaatggttgatatggctcatattgctggcttagtagcaaccggtcaacatccaagtcctgttccagtagctgatgtagtaactacaactacacataagaccttgcgtggccctcgtggtgggatgattttgtccaacaatttagaaattggtaagaaaatcaattccgctttgttcccaggcattcaaggtgggccacttgagcatgtcatcgcaggtaaagcgcaagcattttatgaggacttgcaaccacaatttacagattatattaagcaagtcattaaaaatgctaaggcaatggcagaaacttttgctgaatcggacaatattcgtgtcgtatctggtggtactgataaccatttgatgattatcgatattactaagactggtattaccggtaaagatgctcaaaatttactcgactctgttcacatcactaccaacaaagaatcaattccaggcgatcaacgttcaccatttgttactagtgggttgcggattggtacgccagtaattactagtcgtggctttgatgaagcagatgctaagaagactgcggaaatgattattgaaattttatctgatccagaaaatcccgcaacgattgcccacgttaaagaagaagttcaggcattaactaaaaaacatccaattgaataatttgtgtagcagaatttagccgtcctagttctcagctggggcggcttttgttataataaaaaattaaaaataatggagttaagagtgaaggaaacgtgattatttggaaaagttaaaaagacataaaataggcttattttcagcgattatgctggccttgaattctttaattggttcgggctggctttttggttcaggttctgcagcacaaattgcaggtccagccgcaattttatcttggattttaggtgcagtaattatcatctcaattgcattgacttatgtagaattaggttcgatgtttcccgaaagtggcgggatgagtcgatacgctcaatatagtcatgggccgttattgggctttgtggctgcttgggctaactggatttcactagtcacattggtaccgatggaagccgtagctgccgtgcaatatatgggttcttggccctggagctgggctaactggactaaaaattttattaaaaacggcagtattacttttgctggcttaggtgtggttattatttttatgctgatttttacaatgatcaattttgggtcagttaaaatcatgacccattttaccaatttgatttctatttttaagatcttattgcctactttgacgattacagttttaattgcttcaggttttcatggacaaaactttggcagtaatttacatgaatttatgccttatggtagtcggtccatttttgaagcaacttctgtttcaggaattattatgtcttatgatgcctttcagacggtcatcaatatgggtggggaattgaaaaatccgcgtaagaatattgtgcgtggggtattgatctcaatgttaattactgcggcaatctacattatgttgcaagtgacgtttattggtgcagttgagccaggcatgttagctaaagtaggctggcatgggatcaactttacctcaccatttgcggacattgctattattttaggcattaattggctagtgattttgctctacctagatgcatttgtttcaccatttgggacaggggtagcatttgtagctacggcctcaagagccctagcggcaatgacacacacacgtcatttgccaaaatggttaggtagattgaatcaaaaatacttaataccacgttatgcgatgattgctgactttgttttggcggttattttagtaagcttatttagaaactggaatttactagcaacagtaatcacggcctcaactttgattgcatatttgactggtccagttacggtaatgactctaagaaagaaaagaccagatcttgatcgtccatttaatcctggttatatgaagtggctagctccagttacctttatactaactagtttggcaatttactggtcaatgtggccaacgactattcaggtgataattgttattgccttgggtttgccgatttatttttattatgaaattcactaccaacattcaaatttaaaagaacaattacatagtagttggtggatgatcggttatttgatttttatgtcacttatgtcctttgtgggcagtagcggttttggtggtcagaactggattaagtatccatttgactttgtagtaattatcattatttctctcgccttctattattggggaattaagacagggttaaagaaaatcgatccttatgctgaaaaaattgcgcaaaataaagaataagtaaaaaaactgttgggatttttagtctcaacagttttttgttcgctattctgcttcatcaagatacttatttagcaccttgaaaacaccgttgtcgttattagtaggtgcaataaatttagcagtctttttaacgatatcttgaccattagccatggcataacttaaaccagcaaatttcaacatttcaaggtcattttcaccatcaccgaaggcaattaattcacttcttggcacgtctaaataagctaaaaattcctttagccctgcggctttatttacaccttcaggaataatatccatgtagctccaaccactagttgtgacgtggattttttctgtactacggctgttgaagccatgttctaattcatgtcgaatcttgctgggatagtccattgtgatcttagtgtattggtcatcagcaggaattttattaaaatcatcaatttcgatgctattaggataaaaataatgatgggaccgcttgtattctggtggtgtactttttaaaaagtaggagtgcttaacgccactaattaaaatgttttgggctgcaccaggatagcgtgcgtgcaaatattcaataaaatttaggatgcatttttttgaaaagcttgttgtacgaataatttttccatcgcgaactaagaccgcaccattgtcggcaacaaagtcaatagaatcgataaattcgctaaagtcatcagccaaacgaccagctgggcggccgctagcaataataaaatgtgccccgtgttgatgcagacgagttaaaatctcgctaaacatttgatgatcgtattgtttttcatcgttaacaaaagtaccgtcaacgtctacagcaacggccttaaagggaagagtagtcatctaattacctcactaaaatttgataccgttaacagtttaccatttcttgcaagtgcttacataaattatttatattatgtttaacaataaatttgaaatttacgaggtagaaaaaatgacaccatggtggaaaaaagcagttgtttatcaaatttatcctaagtcatttcaggacagcaacggtgatggcataggtgacttacaaggaattattgctcgtttagattatttggaaaatctaggagttgatgcaatttggctttcaccggtctatcaatctcccggtgtggataatggctatgatatttcaaattatgaagcgattgatccgcaatatggcacgatggctgatatggatgagttgattcagaaagctaaggagcatcatatccgaattgtaatggatctggtggttaatcatacatctgaccagcatcaatggtttgtggaggcacgaaaaagtaaggataatccttaccgagactattatatttggcgtgatcctgttgatggacatgagcccaatagtttgaagtctgctttttctggttcagcttggaaatttgatgagcaaacaggacaatattatttacacttctttgcggaacaacaacctgatttaaattggaaaaatccagagttgcggcaaaaaatctacgatatgatgaacttttggcttgataaggggatcggtggcttccgaatggatgtgattgaattaattggtaaagatcccgacaaaatgatccgtgaaaatggtccgatgcttcatctatatttgcaagaaatgaacaagaatacatttggtgatcgagatgtgatgacggtgggcgaaacttggaatgcgacaccgaagattgcagaagagtactcagatccagcacgtcatgaattatcaatggttttccaatttgagaatcaagctttagaccagcaggaaggaaaagaaaagtgggatttaaagccgctagacttaggcgaattgaaaaaggttttagcaaagtggcagacagagcttgattttaatcatgcttggaatagtttgttctgggaaaatcatgatattccgcgcgtaatttcacgttggggcaatgataaaaaatatcgggtgcagtgtgctaagatgtttgcgacagttttacatttgatgcacggcacaccatatatttttaacggtgaagaaattggtatgactaattgtccggtaaaaaatattgatgaagtagaagatattgaaagtgtcaatatgtatcatgaacgtctggctgaaggttatgacaaagataaactaattcatgcgatcaatgttaaaggcagggataatgctcgtcgtccaatgcaatggaatgatgagaaaaatgccggctttactaagtcaaagccatggttgacagtaaatcctaactacaaagaaattaatgtgaagaaggccttggctgatcctaattcgattttttatacttaccaagaattgattactttacgtcatgaaaatgagattgtggttaatggtgactttaagttggttcatgatactggtgatgaagttcttgcatattatcgtattttaggtactgaaaagtggttggtggttgctaacctatctggtgaagagcaacagtttacgtcgaccgatcgcattaaagaaaacttgcttagtaattatgctgtgcgtaatgatctgcatgatattacgcttaagccttatgaagcatttgcagtggcaattaaataagctaaaattaaaaagaacttgaattactaacttgaagatgttattctagttatcgttaatcgattaatctatgatctgtgatatgatcatggcaaaggagtaataaattatgaaacaaggtattcatccagaatttcaagaagtagttttcatggactcagcaactggtgctaagttcttagctggctcaactttgaagccatcagaaactattgactacgaaggcgaaacttacccattagtacgtgttgaagtttcatcagattcacacccattctacactggcaagcaaaagtttgctcaagcagatggtcgaatcgaaaagttcaacaagaagtacggtttgaagaagtaaaccttttatctggtggaagcagtcccattggggctgcttttttcgttagagattatttggcagaatgcatgaaagacagtataatgttttctgtataaaaatgtttttatgggagtaaatattcaatgaaaatgcaaatggcggaaattgccaaggctttaaatactacttgtgaaggtgacaatcaaactgttattacttctgttgcctttgactccagaaagatcacagatggtggattatttgtaccacttgaaggtgaacgtgatgggcacgaattcatagctagtgctattaataatggtgcttctgctactttatggaaaaaggggcatccgaacaagtcagaagatattgcggttattgaagttgatgatccacttgctgctatgcaagagcttgctcgctattatttgcgtaaggttaatccaaccgtagtgggaattactggttcaaatggtaagactactaccaaggatatgattgctgctgttttgtctaaacgctttaatgtacataaaactcaggccaactttaacaatgagattggtgtgccaatgaccattcttgagatgaagccaaatactgaaattttggtgcttgaaatgggaatggacagaccaggtcaattgcatcatttaagtgaattaacccatccagatgtggccgtaattacaatgattggtgaagctcatattgaattctttggcagccgcgacaagattgcagatgctaagatggaaattactgactttttgcgtgaagatggcgaatttatcttcaatggggatgaaccattattgcaagaacgtgctgagaaattggatcaagctaaagcaacttttggttttagagatgaagatacagttcatgcaactggctttaagagttatatgcatcatgctacctttacagttaatgattcagagcaaaaattctcaatcccaatgattggtaaacacaatgtttctaacgcaatggccgcaattagtgttggtcgtcattttggtgaaagtgatgaggaaattgcctcatcattgtctaactttaccccaacggctaatcggatggagtgggaaaaaggcgatgctggcgaaagcatcatgagtgatatctataactcaaatccaactgctgttagagctgtattgactagttttggccaagttgaagtaaaagatggtggtcgtagaattgctgttttaggtgatatgcttgaattaggtaaaaagtcgccggaattgcatgctggtcttgcagatacaatggatccccagattattaacgaagtttacttatatggctctgaaatgaagaatttatatgatgctttacaaggcaaatatgagccagaacatttgcattattatacacaagaacaaacagatcgaatgattgatgatctgaagaacgatattaagtcggatgacattgtagtattgaaaggttcgcatggaatgcacctagaaaatgtcttagcccgactgagataggagaaaaatttttttgaaattttcagaattaggattaaatgatgcgcttcttaaagcgattaaacgttcaggctttgaagaagcaactccaatccaagaacaaactattccccttgctttgcaaggcaaagatgtaattggtcaggcccagactggtaccggtaagacagctgcgtttggcttgccaattttacagatgatcgacaaaaaagaaaaagcaattcaagcggttattattgaaccaacgcgtgaacttgctattcagacgcaagaagaattattccgtttaggtcgtgacgaacatgctcatgttcaagtggtctatggtggagctgatatcggtcgtcaaattcgctcattgaaacaccatgtaccatcaattttagttggtacgccagggcgtttgcttgaccacttgaaacgcaaaactattaatttagatcaagttaaggctgtcgttctagatgaagcagatgaaatgctcgatatgggttttattcaagatatcgaaagtattttgaaatatgctaagaaccgacaacagacattactctttagtgctacaatgcctaagccaattttgcggataggcgaaaaatttatggatcacccagaaattgtccgcattaaagctaaggaattaactgctgatttgattgaacaatattttgttcgtgctaaagagtctgaaaaatttgatattatgtgtcgactaattgacgtgcagggtccagatttggctttagtctttggtcgcaccaaacgtcgcgtagatgaacttacgcgcggtttgcaagcgcgtggctacaatgcggcggaaattcacggtgatctatcgcaagcgcgtagaatgtcagttttgaaaagatttcgtgaaggtaagctagatattctggttgctactgatgtagctgcccgcggacttgatatttcaggcgtaacccacgtttataattatgatattccccaagatccggattcatatgttcaccgtattggtagaactggtcgtgcggggcaaaatggaatctctgttacttttgttacgccaaacgagattggctatatgagaaccattgagcaattgactaaaaagaagatgtcgccgcttcgtccgccaacagatgatcaggcattacatggtcaattaaagcaagcaaaaattgaaattgaagatttgatgaacggtgatttgggtaaatatacccaaggggcaagtgagctgctggataactattcagctctcgacttagttgcagcctttttaaagaacttggctaaagatgaggttaaagtcaagattaccccagaaaagccgttaccatacaagggtgatggtcgccgccgtcgtggtaaaggtcatggccgtagcaataataatcatggacgcgataaccaccgccgtcgtagtaacaataattcataccgccaaaatggaaaccgcggtaagcgtggtcgtggcaacggacatgaatttgtaatcaagaataagaaagattaggattttatcttaaaaagggaagttgtaatttttacagcttcttttttgtattataatgatgtcattgtgtgaggtgaaaataatgattaaaggagtaggaattgactcgattgaagttgaacgagttaagaagatcgtggacaagggggatgcttttgccaaaaaagtattaactcccaaagaatttgatcaatatcaaaaaatggcaggcaaacgtaaagttgaatacctaggcggacgcttttcattaaaggaatctttttctaaagcaatgagaacgggtctgggaaagtatattggttttcaagatgtcgaaactttatgggatgatttaggtcatcccgttatgacttcaactaagtttgatggaaatattttcccaagtatcacacatgataatcatgaaattattacatttgtagttttggaggaaaaataaaaatatggttccaggctatcaccgtccagccgttgtaaaggtaaatttgggcgcaattagaagaaatataaaaaacgaaatgaaacatcttgcaacagggcaaaagatgttagctgtagttaaggccaatgcttatggtcatggtgcagttgaggtggctaaaattgcgattgaggaaggtgcagcaggcctttgtgtagctattttagatgaggccttgcaattgcgtcatgctgacattgttaagccaattttagttttgggagtagtttctccagaatacgctccaattgcggccgcaaacaatgtttcattaacgattcctaaccttgaatggctaaaggaagcagaaaagtaccttgaaaaagagcagttacagttgaaagttcatattggagtagattcaggcatgggtcggatcggctttaacgaagatgaggattttattgctgctaataaattcttacaaaataacgataatttctacgtagagggtatgttcgcacactttgcttccgcagacagtgctgatgatacttactttaagcatcaggtagaaaaatttgctcatatgagaagtttgttgacagttaagcctaagtggattcacgtagacaataccgctgccagcatctttaacaaggatgtgcctagtgattgtgttcgttttggaattggcatttatggtttgaacccatcctctaatcctgatagtcctgacttgaagtcatcaatttcgcttgaaccagcattatcatttgagagtgaactaactcatgtaaaaactattcatgaaggtgacggagtaggatatggttctacctttgtagctgatcaagatacaattattggaactgtgcctgttggctatgctgatggctttattagaaagtttcaaggctttaaagttaaagttggagacgaatactgtccaattgtcggccgaatttgtatggatcaatttatggtcaaaatgccaaagaaaatgccgttaggaactaaggtagtcatcatttccaatgatccaacagcgccaaataatattaaggccgccgcagattatgttgatactattcactatgaagtagcatgtttgttaaacgatcgtttacctcgtgtttactatgaaaaataagttaggcaataaaaaagtgtctgggaaaaaactagcttccagatgaataaaaacgatcaagatttccttttttaagaatcttgatcgtttttttgttctctttaaaatttttaacaataaaaatcggcccttcagccaccttctttgacaatatttgttcaaattcatcatcataaaggcaattccgatatcggtttcgaccttctctttacctcgcaggtgcgttctgcgcatgccaaatacgttcttcaaatgtccgaaaactggctctacatcatattttctcatgccatagatgtgtctgccttcttcgctttggagaacttcttttgctttttcttttaaatattgccagttaggattatagcgaacttggcgctggcggccgctagctgttttagccaattgttccaattctggcgttagctggaactcgtctgcctcataaaccttaaaatcacggacctgaccagtagaacgatccttacgctggctgtaatatttgaaattgaatctgacgccatgatgatcaatgtaataatcatctttttcattgtagtaccagttgattagcttagttggatcattcttatactttttggtctgttctttttcatacatagtgtagggaataaagtacttcttgtctggatatttttcctccagcatcgaataattgtattcactgccatagccagcatcggcgacgattttgtcaaacttgtccaacacggtcatttgatccaaaaccggctccaaagttttgaaatctgtcggattaggaaagatggcataatcaactacatattgatcggtcgtgactgcttgaatattgtagccaggctttaattgaccatttttcatgtggtcttccttcatatgcataaaggtggcgtcatgatctgttttggaataactgttgcgtccggcaaagatctcttcggcttcttcatatttttgcattcttggcacataatcttttcttagccggtgcagaatcttttttagtccacgtcgcttggcttttcgaggtgaaccgccaggaatggctttgttttcctgctcaatctctttagtcagcttgttaatttctgcttcagtttcttgagctaattcctttagcccctgactagtttgaactttttctttttccatttctttgactacttctttagtaatcaattcatcataaagttcaactgcctggcctttcagcttttcatgatacttttcaaccgctttgcgccagacaaatgtatagcggttagcatcagcttcaatcttagtaccatcgataaaagcagcaccttcattgattaagccttcatcttctaacaggttagtgaagtagataaagctctttttaatcagttcattggcatggctgcttgatctaaaattattgatagtatgatatgaaatcttttgctggtcagccaagatcatcattggcagattttcttccagcatcaactcaatctttctgccagaaaaaactcttctggagtaagcaaaaagcagtattttgagcatcatggctggatgataggctgggcggcccgttttagcagtcttgcctactaaaacatcttctggaattgaatctacaaaccagctgatgacattagccaaatgattggccggaatggcaaaatctagattaagtgttaaagcagtttgacctgtgatataatttttgtacatgttagtttccacctttttgtttttattttgtgatgatttaataatatcaaggctggagctaaaagtatacaaaaagagcgttgaaacaaaaattcaacgttcttttttcatgatctgagacttagttttttcccagacactttttggtagatcagttttttaatccttaacagggtgttcaataaagacacctggattttcatcactcataatagtcatgccggcttgcaaatcttcgatttcagaaactacgaaaccttttctttgtaacttatcaacaatcgttctcatggtaatatctgagacaccagcggggagagtaaagagtgttcttctaacaaaattaccttcgagttcgccagcagctgcatcaagtgtcattacactagacatattagtgtgcttagacacaatcttggacatcttgatcaagttaccacgtgtattgtcagataaaacggtcaaaacgtatgaaccatttttaacatcccacgcatctgacaacatatcaagcattcttgagtgagtaagaataccataaaaatgattatcttcatcaaggacagcaatataaggcaagtccttaatgttgaaaaataccttgaagaatggtgaattgaccttaattgtcttagtggcattcttaagtaagtaagttactggtagattcatatcgccaccttgtgacttatgacggtagatatgcatcttataaatgttaccacggaaaatagtaccagtatcgtcaacgattggcacacatctgtagcctgaatcttctaaaacttttaaagcttctgctaatgtggctttttcattaactgttgttaaataatcttttttaataactaaagatttaataagcatgagttcgcctccgaaagtgagaaatgtttcaagtaattatagcatagttgatgagttaattaaatattaattaaagttcatctgaagtaacaactatattttaacaatagttagacaaataaaaaagcatctccgaaaaaagagatgcttttaagtgaaacaagttttagattattgacgaaccttaacgccagtttccttaaatgccttgtccataaccttcttcaattgatctgcagaagcagtcatcaattcttgttccttgtcacttaatggcatttcaatgatttgttcaagacccttacggccaacaactgcaggagtaccaatgtgaatgtcatgtaagccatattgaccgtccataggaactgaaagtggaagtacacggtgttcatcgttcaagatagccttagcgatcattgctgaagcagtaccgattccgtagaaagtagcacccttcttgttaattatttcgtaagccatgttagcaacttccttgtggatgtcttcaagcttagattcatccataccgtgagccttaacccagtcactaacctttacgccaccaacattgttgtagctccatgctgggaattcagtatcaccgtgttcaccaagcatgtaagcattaactgaacgtgggtcaacatgttccatttcaccgataaccttttgaagacgaccagtatcaagtgaagtacctgaaccgataacacgatccttagggaaacctgacattttccaagttgcgtgggttaaaatatcaactgggttagcaacaactaagaaaataccttcaaagcctgattcaacaactggttcaacgattgatgataaaatcttcaagttcttgttaacaaggtcaagacgagtttcgcctggcttttgtggagcaccagcagtgataactactaagtctgcatccttacagtcagggtagtcagctgcatagatattctttggtgaagtccaaggggtagcatcagctaagtcaattgcgtcaccttcaacgtgttccttagcgatatcaataatacccaattcttcggcgataccttgttgtaccattgagaatgcgaaggttgaacctacagcaccatcaccaacaagaataactttacgaggtctttcatctcttggcataaataaaaatctccttttttattagtgatatttttaacaaaatgaattataccatgatagcaagcattaataaaattattatttcctaattgtgctattatatgtaagattgtgtgcatagtgaggagtaaaaataatgaagataattgcaggtttaggtaatccaggacaaaaatatgataaaacaaagcataatactggtttcatgacaatggatcattatttgaatgaaaagggtttgtcactggataaagataaatttgaaggtcattggactaagcaaaaaataaatggtgaagatgtaattttgcttgagccgcaaacctttatgaatgaatcaggtcgttcagttagtcaagtggctaacttctttaaggttgatccagcagatgtgctaattattcaagatgatatggatatgccaattggtaaaattagaattagagctaatggcaaatctggtggacataatggaattaaaagcatcattcgagatttagggacggaaaagtttaatcgtttgaagattggtattcgtcatccgaaaaatgcaacggttgtttcatgggttttgacaccatttaatgatgaacaacaaaaattgatggatgatgcatttgcgataagtgtagatattattgacgactttatcagcggacatggtagtcaatatttaatgaataaatataattaaaatgcgtttaacagagattttagataaagatcaagatttaaataattttatttcaaaaacaaaacaagtaaaaaattcactaatcactggcgctaatgccggtgcttttagtctattgctaaaacagataacaactaaattagcagctccacttattttaattgaagaaaacgaaagtaaagcacaaaacttatatggtgaactcagtgccattatggcagatgaaactgtgcaaatttttccagtagatgctacaattgcaacgcaaacggcagttagttcgcctgatgaactgagcagccgaattcaggcacttaattttttgttaagtggtaaggcaggaatagtggtaacaacgccgcaggggctgcaatacaaactgaccaatccaactgattttgcgcaggcaaagcggagttttgagccaggtcaagaatatgaactaaaagaactcaatgaatggttgcttgcttcagggtatcagcgtgattctttggtagcacggccaggcgaattcgccatccgtggtgatattttagatgtttatccactagatcgagaaaatcccgtgcgaatcgaattctttggtgacgaaatagatacaattaaggaattcgatttagctagtcaacggagtcaaaaagagttagacaaagtagaagttgcagcagctcaagatcgagtttttactaaggatgcaattgcggcagcggctaagaaaattgaacaagatatggccagtgcaccagctcccgctaaagctgtcaaggaccactttgcggcagttcttgatgaattaaacgatggcggtttacctaaaaactatgctttcttaattgactatttgcttgaaatttctagtagtttactcgaatatttgcctaaaaatgggcagattttatttgacgatttgcctttaattaatcaagcggttgaaacagttgataagcaaaacgctgcttttattaatgatgaactaaaaactggtgcaatgttgccagggcaaagcttgcggtcagattatacaaagattctgagcaaagataagcaccatcgtatttatttctcattgtttcaacgaagcatgggacgactgcgcttaggccagatgctcaattggtcaacacgtgagccagaacaattctttagtcaaatgccgctgattaagtcagaattagaatcttatcaaaaggcggggcaaaccgtcattttacaggctgataatgaaaaaagagcacagcaaattgatcaaacaatggttgattttggcttaaatttaccaattgttggtgcagacgaaattgttgaacaacggacacaaattgtagttgatggctttgttagtggctttagtttaccaacagttaaattggtatatctaacggagcgtgaactatttaataagcgcccacaacgtaaaaaaagaattaagacactggagaatgcccagcgtttgcgcaattatactgaactgaagccaggggattatgttgttcatgttaaccacgggattggtcggtttgaaggaatcaagactttagaaaataatggtaccaagcgtgactatattacgattacctaccagcatggtgatcagctttttgtaccagcagatcaattaagcttagtacaaaaatacgttggttcagaaggtaagacaccacatattaataagctaggtggtagtgagtgggctaaaaccaagcgtaaggttcaatctaaagttgaagatattgcggatgatttgattgaactttatgccaaacgtgaatcagaaaaaggctttgctttttcacctgatgatgatctacaaaaacaatttgaagatgcctttccttatccagaaacacctgatcaattgcgatcggttaaagaaattaagcaagatatggaaagctcgaagccaatggaccgtcttttagtaggggatgttggttttggaaaaactgaggtagccttacgagcagcttttaaggcaattcaggataataaacaagtagcctttttagtacccaccactattttggcgcaacaacactatgagacgattcaagatcgcttcaaagatttcccagtcaatactgctatgctatctcgttttcaaacgccagttgaatcaaaggaaattattgaaggactaaaaaatggcaagatagatttggttgttgggactcaccgtattttgtctcaagatgtaaaattcaagaatctaggattgttaattgttgacgaggagcagcggtttggcgttaagcacaaggaaaagttaaagcagttgaaggcaaatattgatgttttgacattaacagctacgccaataccgcgaacgcttcatatgtcaatggtaggtgtgcgtgatctctcagtaatggaaacgccacctcaaaacagataccctattcaaacttatgtgatggaacaaattcctagtgtagtaagggatgcatgcttgcgtgaaatgcaacgtgatggacaggtcttttatttacataatcggattagtgatatcgatgaaactgtcgaaaaactgcaggaattgatgccacaggcgcgaattgcagctgcccatggtcgaatgagtcagaatcagttggaagatattctttatcgcttcctgaatcgcgagtttgatatcttggttacgactacgattattgaaacaggaattgatatgcccaatgtcaatacaatgatcattgaagatgctgaccactatggtctaagtcagttgtatcaattgcggggtagaattggccgtagtgctcgtttggcttatgcttacttcttgtataagccaaataaagttttaactgaggttggtgaaaaacggcttgatgcgatccgtgacttcactgaactgggttctggtttcaaaatagcaatgcgtgacttatcaattcgtggtgctggaaatatgctgggtgcacaacagcacggctttattgatagcgttggttatgatttgtactcacaaatgctggctgatgcaattcaagaccgtaaggggaagacaacagtcaaaaagtcaaacgcagaaatcgaccttggacttgaggcttatattccagattcgtatatcggtgatcaagaagaaaaaattgaattttacaaaaagattaaagccgtctcaagtcaggaagaattaggtaaaattgaagatgaattaatcgatcgttttggtgactatccaacggccgtcgagaatttattagctgttgccggtctaaaggttgatgctgacatggctcaagtgctcaatgtggttaaaactgacgataagattaaagtggaatttacgaatgcagcttcacgcgaacttgagggacctaatatttttaaggcattggagcatgtaagcttaaaggctcgcattagtatgaatcaagaaaaaagaatggttgtcttgctattgttgccggataaaatgaagaatcgtgttttattcaatgaactggcaatctttttacaggcagcaagcgacattgtacaaaggtaactgtaggagaaaaatatgaggattgataaatttttaaaagtttcacgattagttaagagaagaaccgtagctaaagaaatggctgatcaaggtagaatcaaagtcaatggtcgagttgtaaaatcaagctacgatgtaaaaattgatgatattattgaagtaggttacggcgccaaaaccatcaaggctaaggtgttaaatattcgcgagaccacgaaaaaagcagaagcaagtgaactgtacgagctagttgattaatgacttttgattaaatcgttgttatacttgacttagtatagttatttagtaattaggggattaaacaatgaatcatggtccacgtatatataattcgttgagtccagaagagcagagggcgcgtcttagacgtaaacaggctaaattagagaaagaaacacaccgcaagcggttgaacgtaattatggcagtttttgctatcattttcgttgctttaggtgtacagattgcaatcaagatttctcaaactggacgactgaataatcaagtacaagctgaaaaacagactttaactaaagtaaaaaataagagaaatgacttagaaactgaaaagcaggatttgaaggatccaaattatgttgctaagctgattcgttataaattctattattctaaatcaaatgagaagatttataacgtgcatgaaagaaatgatgataactaatggaaaagtatcaagctggtaatcgggtgactggtgtaattaataacattactgacttgggcatctttgttactttacctaatcggcattctggtttggttcatcatagtgactttggcaataattggctacgcgaacgtcgtcgttatcatgctggcgatgaagtgcgcgtggttgtggtgcacatccataaagggagatttaatttatcgatcactcgagtgaatgatccggaattagttgaccatgataatcaattttctaagacaaagccagctgattttgatcaagtcctgaatcaaacaacgcgggatgctaaagaagaaattgaaaagctaaagcaagtattaactgagaattaagagatggtccgaaagggccattttttgttagaaaaataatgaaaattaatgatttttttgaacaacatcagattgacttaaaggataaaagactattagtagccgcaagtgcgggaccggattccatggctttactagatatgctagttaatttgcaaaaacaactaagttttactgtttttgcggcacattttgatcatcaattgcgtgcggatagctcatatgaagtagaagttttgcaaaattattgtgctcaaaagaagatttgcctgtttaatggcaagtgggataaacatgatcagccccaaacgggaattgaggcagcggcgcgagaggcacgatatcattttttgactaatgttgctcatagcgagcgaatgaactatttattaactgcgcatcatggtgatgatttgctagaaaatattttgctcaaatttattcgctcgggaaatcctgaagagatgaatagtttgcaagatatcggctctatgcatggcgttgttttgcttagaccactattagcctatagtaagcaagaattactcgaatatgatcaagagcgtgaaattgactatgtaatagattcaactaatacggaggatgagactgttcgaaatcgactgcgtcatcatgtggtgccattattaaaagaggagaatcctaatttaattagtaatgcactgcgttttagtgaaaaaatgagtcaattgacggatttggcggatgagcagttgaatagtatgagaacggttgagccatttttgggtgcttggcgaattaaaacggacaacttaaatgatttatctacagaagaaaaaaatattttttggcaaaagataatctggcaaaaatatcatcgccgggtaaatgaaaatttgggcaattttgaggtgattgattatcaaggttatagttatttagttgaaaataagccacagaaaattgtgcagccatttagtatcgaactaaatcagcaatttgaattcaacggagcttattatttactaactactgataggcaagctgatttgaaagaaataggaagcttttggctggaaagggatgcacattttactgcgggaagtctagtacctgctagcaaattattgttgaaaaatggtcaacgagttaaggcgaaaaagaaattttcagaaaaggcaattccctttgccttgcgctcttgctgcattacaatttatgctgaaaatgaacctgtttttgtagaaaaatgttatcaaaaacaggactttatcacagatggtaaacattatttcctatacatttattaagaagtcttcaaaataggtgaaaatgttagtggttgcaagctaatttgtgatagaattttaaacgtataacttaaagactttgcggaggttttttatgaagaataaccggaatcggctactttcaaacggccttttctatatagttgtgttccttctgctcctatggggaatcaactgggcactcggcggctctaacaatagtggtagctcagagaatatcagttactcacaatttgttaaagatttgcgtcaaggcaaagttaaaaactttagtgttcaacctgctaatggtgtttacactgtttcaggtagttacaagactgcacaaacaacaaagaatcaatcaaataatagttttgatttctttagtaataattcaagtagaaaagtttcgcgcttctctactaccatgttacagaatgattctaccgtttctaacgtgcaaaacttggcacaaaaaagtaatgctcggatgacaactcaaggagaatcacaatctggcaattggatttcgaccattgtcatgcttgtgccaaccgttttgtttatcgtcatgctttggatgatgatgaaccaaggtggcgctggacgtggtggtggcggcggaataatgaatttcggtcgttcacacgtcaagccagaagatccttctaagaataaggttcgtttctctgacgtagccggtgaagaagaagaaaaacaagaattagtcgaagtagttgaatttttgaaagatccatctaagtacactaagttgggtgcaagaatcccatctggtgttttacttgagggtcctcccggtactggtaagactttgcttgctcgtgctgtagctggtgaagctaacgtgccattttattcaatctcaggttcagacttcgttgaaatgtttgtcggtgttggtgctagtcgtgtacgtgacctgtttaacaatgccaagaaaaatgcaccaagtattatctttatcgatgaaattgatgccattggtcgtcgtcgtggcaatggcaccggcggtggtaatgatgaacgtgaacagactttgaaccaattattggttgaaatggatggttttgaaggcgatgaaggtgttattgtcattgctgctactaaccgttcagacgtcttagacccagctttgcttcgtcctggtcgttttgaccgtaaggtattggtaggtcgtcctgacgttcgtggtcgtgaagctattttaaaggttcacgctaagaacaagccgcttgcacctgatgttgatttgaaggaagttgcccgtcaaactcctggctttgtaggtgcagatttggctaacgtcttgaatgaagccgcattagttgctgctcgtcgtaatggtactgagattactgcatcagatattgatgaagccgaagaccgtgtgattgccggtccagctaagaaggatcgtttgatttctgaaaaagaaagaagacgtgttgctttccacgaagctggtcactcaatctgtggtttggtcttaagcgactcacgtactgtacgtaaagttactatcgtacctcgtggccgtgctggtggttataacatcatgttgcctaaagatgatcaattcattttgactaaaaagcaattatttgaacaaattgttggtttgatgggtggtcgtgcaggtgaagaagcaaccattggtgataagtcaactggtgcttctaacgactttgaacaagctactcaaattgcgcatagcatggtagttaactatggtatgaccgaatccttaggtatggttgagcttgaaaaggaaggcgaaagcaatccttacggctttaagccatatagtgaagcaacttcagctaaaattgatgaagctgtaaagaagattttggatgaagctcatgctaaggcccttgagatcgttaaggacaacaaagaaaagcatagaatcattgccgaagctttgctcaagtatgaaaccttgaatgaaaagcaaattatggccttgtataagactggtaagatgcctgaaaaagacgaagatgaatatccgagtgaatcaaaggcttcaacttatgaagaagctaaggctgctgcagagaagcgcgaagttgaaaaggcagaaaaaaaggattcagatcaagcattagctgatcaagaaaaagataccttggagactccatctgaaaagaatcatgaagttgaagaaaataatcctgagaatcccgaaaaggatcaatcagaaaatgaaacttcaactcaagatactcctgcagatgatgagcataaagacaattaaataaaagtagggcctgtcacaggctctatttttttagaaaagaaggataaaaatgagtgattatttagtaaagtcaattgataagactaaaaacttacgcttgttaaccattaccgctaagggtgtagtgagtgaagcacaaaagcggcatgacttgtggtcagcttcagctgctgtgcttggtcgtactttagtaggatctcttttacttgctggtgcagaattgacagataaggaagaattgacagtccgtttattaggcaatggccctgttggtccaaccatcgtgacagctacctccgatttgaaggtaaagggttatgttaagaatccacatattgctttaccacctaagaaaaatggtcatattgatgtgaaaaaagctgttggacaaggatggtttgaagtaactaaggaccttggcttgaaggaaccatacacaggtcaggtaccaattgtttctggtgaaattgctgaagattttgcttactatttgactaagtcagaacaaattccgtcagctgttggtttgtcagtatttgttaatccaaataattcaatcggtgaagctggtggctttatgttgcaagcacttcctggtgctagtgatgctttgatcgatgaaacgattaagcgaattgatgcattgccagcactctcaacttcatttttggatggaatgacaccagaagacttagcacgtaaaatcttaggaaccgattgtaagattcttgaaaaagatgatgtagcctttaactgtgattgttctaaagaaaagtatgctggtattttggaaactttgaagagcgatcaattgaaagcaatgattaatgaagatcatggtgccgaacttacttgcaatttctgcggtaacaagtatcattattcagaagatgaattgaaagatattttagctaaaaagaacaaagataaagattattaaggcaaataaagccctaaggttttaaccagcggggcttttttgatatcataatagggtaattttgaaaggatgatttggtgaataacagctggaaaattcgcgatatcaccattccaaaccgagttgttgttgcgccgatggcgggagtttcaaactctgcattccgcgttgtctgtaaggaattcggagcggggctggttgtctgcgaaatgatttctgatcatgggatcatttatggaaataaaaagacattaagtatgatggatgttgatccgcgtgaacacccaatgagcattcaaatctttggcggaagcgaggaaactttgcttcaagctgctcaatatattgatcaacataccgatgcggatattattgatattaatatgggttgtcctgtacctaaagtaacaaagactgatgcaggttcgaagtggctacttgattcaaacaagatttatcagatggttcacgcagtagtgcagaacgttaaaaagccggtttctgttaaaatgagaacaggctgggataaaaagcatatttttgctgtagaaaatgctttagctgctcaagaagcaggcgcaagcatgattgcgatgcatggtagaacacgtaaacaaatgtatcaaggtgaagctgactgggaagtattacatgatgttgcccaggtgctagatgtgccttttgtggctaatggtgatattagaacacccgaattagctaaaaaagcattggatgagatcggttgtactgcagtaatggttggtcgcgctgctttaggtaacccttggattttgaaagatatggtacactatctggaaactggtgaaaaattgaagccgcaaactgttcgtgagaaggttgaaacggctaaacatcagcttcacgcacttgttaaaattcacggtgaaaagcgtgctgtaccagaatttcgtcagcaagccgcgtattatttaaagggaattccccgttcagcccgtactcgtgctaaaataaatgaggtctggacgcgtcaagaagtatatgatttgcttgataattttgttgacgagtatgaaaaaagagaagaagctcgtgctgcacgacgcgcgacaatgaacaaataaatggaggaaaagtaaattggcaaagaatgaaatgaatgaccaattaatagttcgtcgccagaagatggaagaattacgtgaaaacggaattgaaccatttggtcaaagaaaatttgatcgtcaagatttggcaagtactttagaagaaaagtatggcaacgaagataaagaagaattaaacgctgatatgcctaagaccaagattgcaggtcgtatgcttgcaaagcgtggtaagggtaaggttggttttgctgatctttacgaccgtactggtaagattcaaatctatgtacgtaaggatattgttggcgaagataactacaagatctttaagaaatctgatattggtgatttcttaggtattgagggtgaagttatgaagactgatactggagagcttactattagagcccttcacgtaactttcttatcaaaggctcttcgtccattaccagataagtaccatggtttaaaggacgttgaggcaatttatcgtcaacgttaccttgatttgattaccaaccatgatagttacatgcgttttgttcaccgtacccaaatcattcaagctattcgtgactacttaaatagtcaaaacttcttggaggttgaaactccagtacttcacaacattcctggtggtgctgaagctcgtccatttattactcaccacaacgctttggatattaacctttacatgagaattgctttggaacttccacttaagcgtttgattgttggtgatatggaacgtgtttacgaaatcggccgtgtattcagaaacgaaggtttggacactcaccacaacccagaatttactgaacttgaaagttacgcagcatactgggactaccatgatgttatggatgaagctgaaggtattatccgtgctgcagctaaggttgtttcagatgacggtaagatcacttaccaaggtactgacattgacttaggcaagccattccgtcgcgttcacatggttgacttgatcaaggaaaagactggcgttgacttctggaagccaatgactcttgaagaagcaactaagattgcggaagaccacgacatccacgttgaaaagttctggaaagttggtcacattattaacgccttctttgaaaagtactgtgaagaaactattgttgacccaaccttcgtttacggtcacccagtagaaatctcaccacttgctaagaagaatgctgacgatccaagatttactgatcgtttcgaaatttacatcatgggtgaagaatacggtaacgccttctcagaattgaacgatcctgacgaccaacgtgaacgtttcgaagctcaaatggaagaacgtgaagcaggtaacgacgaagctgacatgatcgatgaagattaccttcgtgctatggaatacggtatgccacctacaggtggtttgggtatcggtattgaccgtttggtaatgcttttgactgatgctccagctattcgtgatgttcttttgttcccaacaatgcgtccagaacgtgttgaaagcgtagaagctgaagttaaggctgatatggaaaagaagaataaagaaaataagtaatcttataaattaaaaaactcttatctatgttttaagcatggataagagtttgtgtttatatattttttaattgagaatcattttttcatcagagtattttttaggatcatttaaatcccattgctgatatctaacttcttgacacttaaagcctaattttttgtaaagctttttggccttagtattttctgcaaatacatcaagactaactggtcgactcatgtatctcaaagctgtcgttgctaaagcatacccgatacctttattttgatgaattggatctacataaatgtaatccagttcttggggatgaactgcaacgaagcccaatatgctgtcagcatcataagctacataaattttgcaggagaaaaaatcatccttatatggagctgtctctaaaggtatgaagtatttttccgcaccaccaattgttagctcttctttacgactaacgtcgtgaatgcgacatacttcagcataatcgtttggttgatattctctgatattaaattttggcatgtttttctcgcttcctaatattaagattttgatttagaaagcaatagtacgtaatctcatgtgaaatctcctttaattaaattgaagatattatagcaatttttttaattcggtacaataactaaaattaacttagttaaaaacagataagtaatattttttcaaaaagtatttgcaaagagaataatctttgctataataatttttgtatcgcggaagtagttcagtggtagaacatcaccttgccatggtgggggtcgcgggttcgaatcccgtcttccgctccaagatgaagagctcacgaatgtgagctttttttgtgcctaaaataaatttatcttttttgataaaaaggtcttgcaaagaaaaatgtatttgctataataatatctgttgtcgcggaagtagttcagtggtagaacatcaccttgccatggtgggggtcgcgggttcgaatcccgtcttccgctccaagatgaagagctcacgaatgtgagcttttttgtgcctaaaataaatttatcttttttgataaaaaggtcttgcaaagaaaaatgtatttgctataataatatctgttgttgcggaagtagttcagtggtagaacatcaccttgccatggtgggggtcgcgggttcgaatcccgtcttccgctccaagatagaaggctcaccaagtggtgagtctttttttacgggaaatagctcagtttggtagagcgctacgttcgggacgtagaggtcgccggttcaagtccgattttcccgatatacaagctatccgtttgggtagcttttttctttttgttataatatcttttaaaacttaaagggagattaaaaatgacggcaactactgaagaaaaatacaaattattagtggagcaagctagagctttgattgagggagaagatgattggattgctaatacagctaatttatctgctcttttgtttaattcgttaaatgatgtgaattttgcaggtgtttatcgctatgaaaatgatgaactgatattaggtccatttcaggggatgccagcatgtgttcatattcaaatgggaaaaggtgtttgtggtacggctgcacaagcaaaaacaacgcagattgttaaggatgtacatgaatttgctggtcacattgcttgtgatagtgcttcaaattcggaaatcgttgtcccaatttttaatcagggaaaactttggggcgtctttgattttgattcgaccaagctactaagcgtataattttttacggtaagttgaataaataattaaaaaagcccaagtcctttgaatttggacttgagctcaaacaaaaagaccagtagtctgatgttaagaacaaaaaacacattagaagctggtcttttatgaattcaattgtaactgaaatcgcaaatattataaagtctgaagataattatattaagcgtgaaagaaaaataatctgtttcttcttaaacctgattaaggaaatcatggccttggctttagctaaagttgatgatgaaatgattaccaaggttaaagcacagggctatcagattgataagaagaatgagcgctcaatcaatatggcttttggcgaagttaggtatgtcagaagaagatatgtctgcccaggcaaacaagcaaggtatcccttggatgaattaatgggcttttacaaatacaagcgctacagtattttagcagtcaaaaacatcttagaagtaagcagcgttgccacttatcgcaatactgctctagcagtcaattgcctgtctggctttaatattagccatatgcaggtgggcaatttggtaaaaatggccgggaaaaatattaaagcgggccaagaagcagattcaagatatgatgccgcaggcactaagaaaaaggtcccagttttgtatcttgaaggcgatggcgtggtgatcaaaggcactaaaagccggttggaatttcatcgctatcaggtctgtgaaggcattgtcaatataagcaagaaacgcagaaagcgaatcaatgccaaggaatttgtttctttaagccgacttgatgcgctgaacgaagccaaggagtacctggccaatacttatgatctttctgatactgtaattcttagcaacgccgatggcggtgctggatatgccaaaacagacttcgatgacattgtagggctatgcaagcgtcatgagcatttcttggatgtctttcacctaaataagaaaatcaaagaaaggctatattttgcgcctgacctgcaaggcaagctgatttctgctttggaatacaaatacagctatgacaaagttaaaactatcctaaccactgcagaaagccgactaattgatgaattgaataccgagctcaatcatgattatctggggcgcctaaggaattatattgatcgtcattgggacgatattaagccgtttaagaaacgaaaactgactgtgactaaagccattggctgctgcgagagcaaccaccgcaagtatacctaccgtgttaaggggcaaggcaagaaatggtcaaaatctggagcagaaggcatgcttaggatcttaagctgcatcaagaatcgagagctggaattttggcttagcagcgagtttgaagattcagaaataactgtattgactgaacaggaattaaaagcagcggcccgtgacagcttaaagaagcgtcatgaagttcatttaggcatccagcatggcgcattaaccgcacaggtagctggcaatagttatttaagcaagctaagcagaaatttaagtcatataaatatttaagaaattaaggttagactaatggtttaaaggctaccgcaaaaacattgacacttacaccaagctagctaattttgacgaaattgataaaaagtatttaactgaaatagcgaaagcaatttttgcgtaattattagaattggacataatgaagttgaagataagtcaaattgttttacttactgacaaaagaaaagtaaaataccataacgtattttaaagggtggtgtttgtatggaaaattcatatagtaagagcgttaatcaagtattgaaaattgcacgtgaacaagcacaaaattttcatcatcgcttgattggcacagaacatgttttattggctctagtaattgaaactgacggtgaagcaggaaaaatcttgcgttcatggggattaacaccaactgcagtacgtgaagaaattgaacgttatacaggttatggctctgcccctaaggcaagctacatggaaatgtcaccacgtttgagtttagctttggattatgctagaagacgagctaatgacgatggagttaaggaagttaacactaatcatgttttgctgggaattactgcaagtgagcaggttttatcagcaatgattttgaaaaacttgaatgttgatattcctcgtctgcagcaggatgttgaagacagtttgagtcaagaccaagactttggtgattcagctaattggctgggtgatgataacacgacgactggtcaaaagaagcgcaagagcactactcctaacttagataaggtagcggttaatttaaatcaacgtgtgcgtaatggcgagattgatccggtgattggccgtgaccaagaaattaagcgtgtgattcaaattttgtctcgacggactaagaataatcctgtcttagttggtgaaccaggagttggtaagactgctgttgctgaagcgattgcaactgagattgtcaacaaaaaagtgccacaggatatgcttaagaaacgggtaatggccttaaatttaggtagtttagttgctgggactaagtatcgtggtgagtttgaagacagaatgaagaaaatcctgaacgaagtcaccaaggatggcaatgtcattctctttgttgatgaaatgcatactttaattggtgctggtggtgctgaaggtgcaattgatgcttctaatatcttgaagccttcgcttgctcgtggcgatattcaaatgattggtgcaactacttttaatgaatatcaaaagtacattgaaaaagatcaagctttggcacgtcgttttcaacaagtgcgcttaagtgagccttcaagagatgacactttgacaattatgcgtggcttgaagtcgaaatatgaaaagttccatcatgtgactatttctgatgagagcttgaaggatgcagttgatttgtcaacgcgctatatttcggatcgctttttgccagataaggcgattgacttagtagatgaagctagtgccgcagttaagattcgtaataacattagcaatgatgctgagctagaaaaagttaatgagcaaattaagaaactgattacgcaaaagaatatggctgccgctagtcaaaactttgttaaagctgctcaattgcaggatgagcagaacaacttagaaatgcaacgtgaagcaatggtagagaagttagaagacaaagttagtgctaaagctgtggttgagccagaagatatcgctaaagtagtttccaactggactggcgtccctgttacccagatggaacgcaatgaatcacggcagctagctaacctggaaaagattttacaccaacgtgttattgggcaagataaggctgtttcagcagttgcccgtgctattcgtcgtagtagaagcgggattaaagatgaacgtcgtccgattggttccttcttgttcctaggtccaactggtgttggtaagacagaactagctaagtcagttgcagcagcaatgtttggctcggaagacaatttgattaggctagatatgtctgaatatatggaccaaattgcttcaagcaaattaattggctcggcaccaggctatgtcggttatgaagaaggcggtcaattatctgaaaaggttcgtcgtcatccgtactcggttattttgcttgacgaagtagaaaaagctcatccagatgtctttaacttgcttttgcaggttttagatgaaggatttttgactgactccaaaggtagaaaagtcgactttagaaatacaattataatcatgacttctaatttaggttctcgttcgctctttgataataaggcagtcggcttcaatgcagataatgcagatccagccaaggcgagatcagctaaagttgaacaagcaatcaaacaattcttccgcccagaatttttaaacagaatcgatgaaactattatcttcgatgaactagataagaagcagctgcgcaatattgtaactttgttaacgcacaagctggtagttcgtttgcaaaagaagggtatcgaattgaagctatcacgggcagcactggatcagattgcacaagatggttatgatccagaaaatggtgctcgaccattgagaagagcaattcaaaatgatattgaagacaagattgccgagatgctgattgtaggcgaagttaagtcaggcgacactttgaaaattggtagtcagcatggacatttaaaatttgaagtagttaatccgaaaaaagaaactgtaaaagtcaagtgatattggtgctataccttgacaaaatgctgaaaatatcatataatttttgctgatttaaaaagactgagattcaggattttgctgatctattgtccagcaaaatgataagggacaaaaacgacaattgttgtttttgtcttttttatgcctaaaattgcagttttttgaatttgtaacagaaatgtaatatttgctttcttagacagaaaggatgtttttccttgttaaatggacacgtagtgaactacggtaaacatcgaactagacgtagcttctcccgcattaaggaagtattgaagttacctaacttaactgatgttcaaaccgaatcatataagtggtttcttgataaaggcattaaagaagtctttgatgacattatgccgattagcgatttctcaggtaagctttcattagaatatgttggctataaattgcaaaagccaaagtatacagttgatgaagcccgtaaccatgatgcaacttatgctgcaccaatgcacgttaccttgaaattgactaaccaagaaactggtgaaattaagactcaagatgttttctttggtgatttgccattaatgaccgaatcaggttcatttattgttaacggtgctgaaagagttatcgtttcacaattggtaagatcacctggtgtatattacactggcgattatgacaagaatggtcgtcaaatctttggtactactgttattcctaaccgtggtgcttggcttgaatatgaaaccgacgcaaagaacgtttcatttgttcgtgtagaccgtactcgtaaattgcctcttactgtattgattagagcaatgggtattggctctgacagtgacattattgatatgtttggtcaaagtgatactttgcaattcactttggacaaggatgttcataagaacccagctgactcacgtgtagctgaagccttaaaggatatctatgaaagacttcgtccaggtgaaccaaagactactgattcttcacgttcacttttgtatgcccgtttctttgatccacgtcgttacgatttagcacctgtaggtcgttacaagatcaataagaagctttcacttaagaaccgtttatacggtcaaactttagctgaaactttagctgatccagatactggggaaattgttgctaagaagggtactgtagttacccacgaagtaatggataagttagctccataccttgatcgtgatgactttaagatggtaacttaccaaccttcaaaggaaggcgtattaccagatcctattacagttcaagaaattaaggtttactcaaaggtagaccctgaacgtgaagttaaattaatgtcaaatggtcatattgctgataacgttaagcatttgactccagctgatgttttagcttcaatcaattacttctttgcattgcaagatgaaattggtactactgatgatatcgaccacttgggtaaccgtcgtattcgtcgtgttggtgaacttcttcaaaaccaatttagaattggtttggcacgtatggaacgtgttgttcgtgaaagaatgtcaatccaagatccttcaacagttactccacaacaattgatcaacattcgcccaattgttgcaagtattaaggaattctttggttcatcacaactttcacagtttatggatcaacataacccattaggtgaattgactcataaacgtcgtatgtcagccttagggcctggtggtttgacccgtgaccgtgctggttatgaagttcgtgacgttcactatactcactatggtcgtttgtgtcctatcgaaactccagaaggtcctaacattgggttgatcaactcacttgcttcatatgcgattattaataagtatggttttatcgaaaccccataccgtcgtgtttcttggaaggaccacaaggttactgataagatcgactatttgactgctgacgaagaagataattacattatcgctggtgccaacactccattgaatgatgatggttcatttaaggagaagttgatcttggctcgtcaaaaggaagataacgtcgaagtttctccagataagattgactacatggacgttattcctaagcaagttgtttctgtcgcttcagcatgtattccattccttgaaaacgatgactctaaccgtgctttgatgggtgccaaccagcaacgtcaggctgcaccattaattaatccgcatggttcacttgttggtactggtatggaataccgtgctgcacacgattcaggtgctgctttaatcgctaaggctgctggtgtagttgaatacgttgatgctaatgaaatccgtattagacgtgaagatggtactttggacaaatacacacttgaaaagtaccgtcgttcaaataactctaagtcatacaaccaaactcctaatgttaaattaggtgatcaggttgacaagagtgatgtaattgctaacggtccaactatggatcatggcgaacttgctttaggtcaaaacccattgattgccttcatgacttggaacatgtacaactatgaagatgccatcatgctttctgaacgattagttaaggatgatgtttatacttcaatcagtattgaagattatgaatcagaagctcgtgacactaagttaggtccagaagaaattactagagaacttcctaatattggtgaggatgctttgaaggatcttgatgctgatggtatcgttcgtgttggtgcagaagtccacgatggcgacattttggtaggtaaggtaactcctaagggtgtaactgaattatctgctgaagaaagattacttcacgctattttcggtgaaaaagctcgtgaagttcgtgatacttcacttcgtgtaccacacggtggtggcggtattgttcaagacgttaaggtttatactcgtgaagccggcgatgaactttcaccaggtgttaacacaatggttcgtgtttacatcgctcaaaagagaaagattcaagttggggacaagatgtctggtcgtcacggtaacaagggtactgttgctgcagttgttccagaagaagacatgccatacttaccagatggtactccagtagatatttgtttaaacccaatgggtgttccatcacgtatgaacatcggacagcttcttgaattgcacttaggtgcagctgctcgtcaattgggcattcacgttgcaacaccagtatttgatggtgctgacgaaaatgacgtttgggacacagttcgtcaagcaggtgttgataaagatggtaagaccgttgtttatgatggtcgtaccggtgaaccattccacaaccgtgtatctgtaggtgttatgcactacttgaagttgacccacatggttgacgacaagatccacgcacgttcaattgggccttactcattggttactcaacaaccacttggtggtaaagcacaatttggtggtcagcgttttggtgaaatggaagtttgggcccttgaagcttatggtgctgcttacacattgcaagagattttgacttacaagtcagatgacgttgttggtcgtgtaaaggcatatgaagctattgttaagggtgaaaagattcctaagccaggtgttccagaatcattccgtgttcttgttaaggaacttcaatcattaggtttggatatccgtgttcttgatatgaaccataatgaaattgaacttcgtgatatggatgaagactcaagtgaacacttgaacatcgatactttgtcacggatggcagaagagcaagaaaagaagaagttagccgaagaaactggaaaatcagaagataaagacagtaaagaaaatgcagataagccggtagctcctgcagatgagtctgacgataaagtttctaaatagtaggaggttaaacttttgatcgacgtaaataagtttgaaagtatgcaaattggtcttgcatcacctaacaagatcagaagctggtcatatggtgaagttaaaaagccagagaccatcaactaccgtactttaaagcctgaaaaagatggcttatttgatgagagaatttttggaccaacaaaagattggtcatgtgcttgtggtaagtacaagggcgttagataccgtggtatcgtttgtgaccgttgtggtgttgaagttacttcttcaaaggtaagaagagaacgtatgggtcatattgaattggctgcacctgtaactcacatttggtactttaagggtatcccatcaagaatgggattagttttggacatttctccaagattacttgaagaagttatttactttgctgcatacattgtaattgatccaggtgatactgaccttgaacctaagcaattattaactgaagctgaataccgtgaacaaaaagctaagtacggtaaccgttttgaagctaagatgggtgctgaagctgttcgcgatttgcttaagaaagttgaccttgataaagaagttaaggatttgaagaaagaacttcaaactgccactggtcaaaaacgtacgcgtgcaattagacggttagatatcttggatgccttcaagaattcaggtaacaagcctgaatggatggtaatggatgccgttccagtaattccaccagatcttcgtccaatggttcaacttgaaggtggccgttttgcaacttcagatttgaacgatttgtacagacgtgtaatcaaccgtaacaaccgtttgaagagattgcttgatttgaacgcacctaatattattgttcaaaacgaaaagcgtatgcttcaagaagctgttgatgctttaattgataacggtcgtcgtggtcgtccagttgttggaccaggtaaccgtccattgaagtcactttcacatatgcttaagggtaagcaaggacgtttccgtcaaaacttgcttggtaagcgtgttgactactctggtcgttcagttatcgatgtttcaccaaaattgaaattctatcaatgtggtgtgccacgtccaatggctttggaattgttcaagccatttgtaatgcatgaattagttaaacgtggaattgcatcaaacatcaagaatgctaagcgtaagattgaccgtgaagatgacgatatctgggatgtacttgaagatgtgattaaggaacgtccagttcttttaaaccgtgcacctactcttcaccgtttgagtattcaagcctttgagccaatcttggtaccaggtaagtcaattagacttcacccattagcttgtgaagcctacaatgccgacttcgatggtgaccagatggctattcacgtaccactttctgatgaagctgttgctgaatcaagattgttaatgttggctgctcaccacattttggctcctaaggatggtaagccaattgttactccatcacaggatatcgttttgggtaactactggttaactcaggccgaacgcggtcgtgaaggtgaaggtatgatcttcagctcaccagcagaagctgctgtagcttacgaaaatggcgatattcactaccataccattattggtatgtctgcagatgctatgcctaaaaagccatggcctaagggacatgaacacggcatctttattaccacttatggtaagattgtcttcaatcaattgttcccagatgattacttctatatcaatgaaccaactgaagagaacttgaacaatccgttggatgctaagtacttcttaggtgaaggcgaagagattgataagaagatcgatgaagtaggcgatgatttaatcgctagtccatttaagggaagcttcttgtcagattctattgctactatttacaagtattacaaggttcaaagaacttcagaatacttggatgatttgaagaagttaggctacattagctcaactacttcaggtattactattggtatgactgacgttccagaaatccaagataaggatgaaaaggtagccaaggcacgtaaacaagttgatgttgtttctaagcaatttagacgtggtttgattactgaacaagaacgtcacgaccgagtaattagtatttggaatgcatgtaaggacaagatccaaaacgaaattgcacaaattcacgcacctcgtaatccaatttcaatcatggcagactcaggtgcccgtggtaacatttctaactttactcagttagccggtatgcgtggtttgatggccactcctaacggtggtttgttcgaaattcctgttacttcaaactttaaggaaggtttgtcagtattggaattgttcatgtctactcacggtgctcgtaagggtatgactgatactgcattgaagactgctcagtcaggttacttgactcgtcgtttggttgatgttgctcaggacgttattattcgtgatgacgattgtggtactgatcgtggtattacagttagtgccatcatggaaggtgacgaaatgatcgaaccattatttgaccgtttggttggtcgtttcactgctgagactgttaaagatcctgaaactggcgaaactattgtcggcagagatgtcatgatggatgaaaacatggcacacaagatttgtgatgcaggtgtaactcacgttaagattcgttcaattcttacctgtgatactcctcacggcgtatgtcgcaagtgttacggtatgaaccttgctactggtgaagaagttgaagttggtgaagcagttggtactgttgctgctcaatcaattggtgaaccaggtactcagcttactttgagaactttccacaacggtggtgttgccggtgctgaagatatcactcaaggtttgcctcgtgtgcaagaattgtttgaagcacgtaaccctaagggtcgtgcaaccatttctgaagttgatggtgtaattgattcaattcaagaaaacccagcagaacatactcgtgaaattactgttaagggtaagattgatactagaagctacagtgttccttatacagcttcagttgctgttagcgaaggtgactacgttcatcgtggtgacaagttaactcttggttctgttgatcctaaggaattgattcaagttactgatacattaactactgaaaagtacatcttagctgaagttcaaaaggcttatagaatgcagggtgtagacattgccgacaagcacgttgaagtgttaactcgtcaaatgctgcaaaaggttcgtgtccttgatccaggtgaaactgacatcttgccaggtgaagttatggatattggtcaatttagagaccgcaacaaggaagttattatttctggtggtattccagcaactgctcaaagcgttatcttgggtattactaaggctgctttggaaactaacagtttcttgtcagctgcttcattccaggaaaccacacgtgttcttactgatgcatctattagaggtaagaatgatccacttcttggacttaaggaaaacgttattattggtaaaattattccagctggtactggtatgcctgtataccgcagcatggaacctgaagctgacgttaagaagccagattcagtatactcaattgctgatattgaaaagcaaatgaaagaaaaggataaagctaagcaagactaagctttattgaaaataaataagcatttccaatcttttaagagcgggaatgcttatttttttgtctaaaaaattaattgggttagtactaatcctaggaaaatatatggaataaatggatagcgatggttaataggagttttttcaataagaaaaattgcaattaccaagattgaagcaaatagaaaaactaaattggcaaatgatggggtgaagtagcaagcgataattaagtaaattaataaatcgcctagccccatttttctttgcattatgctatagctaaaaattcctagcaataatgtaaaagagatccagtcgattaatgtaaaagctgcaaattggttgaataaaatcgcaacgctaatggctggaattagtaggagaagatcaaattcttgcttttgataatcagagattgcaacgactaaaagcgaaaaaagcaaaatagcggtaataatgtcctgtgtcttactaaaatcgagtaaacaaaaggcaaagccgccaattaattcaaataaaaataattcaactggaatttgttgataacaataacgacattttccttgaagaaaaagataagataataatggaatttcatccaaaattgataattcaaggtgacagttgttgcactgagaacgtgagtaaataaaatttttatcattccagtgctcgtaaactactgctgcgtgagaagccaagcaacttccaattataaagttagtaaaaataaataagtatttcaaaaaaacacctccactatttattacgcaaaaatagccgatttttctttttttattttgaaaaagtttgctttctgcttaaaaccgagtacaatagtctttgtatgttttgaacagtctattcgtgagtaaaaaagaaactcccggatgtgtgaacaaaatagtattttaggaggaaaaattaatgccaaccattaatcaattggtaagaaaaggccgtcattcaaaggtcactaagtcaaagtcacctgctttgaattacagctacaacagtatgaagaaggaatcagtattcaacccagctccacaaatgcgtggtgttgcaactcgtgttggtactatgactccaaagaagcctaactcagctttacgtaagtacgctcgtgttcgtctttcaaacttgatcgaagttactgcttacattccaggtgaaggccacaacttgcaagaacactcagttgtattaatccgtggtggtcgtgtaaaggaccttcctggtgtacgttatcacatcgttcgtggtgcccttgatactgctggtgttgatggcagaaagcaaagccgttctaagtacggtactaagaaagattaaaggaggagttaaataatgcctagaaaaggtcacgtaactaagagagacgttttagcagatccagtttacaactcaaagcttgttactaagttgatcaaccacttaatggtcgatggtaagagagctaaggcatcttcaatcctttacgatgctttcaacattgttcaagacaagactggtaaggaaccacttgatgtatttgaagaagctatgaacaacgttatgccagttttggaagttagagctcgtcgtatcggtggttcaaactaccaaatcccagttgaagtacgtcctgaaagaagaactactttaggtttaagatggcttgtttcatacgctcgtttacgtaacgaacacactatggatgaacgtttagctaacgaaattatcgatgcttcaaacaacactggttcagcagttaagaagcgtgaagatgttcaccgtatggctgaagctaaccgtgcatttgcacactaccgcttctaatttgttcgttttaatttaaggagagaataatttatggctaacaagcgtgaatttccattagcaaagacacgtaacatcggtattatggcccacatcgatgcgggtaagactactactactgaacgtatcctttactacactggtaagatccacaaaattggtgaaactcacgaaggtgattcacaaatggactggatggatgaagaaaaggaacgtggtatcaccattacttctgcagctactactgcacaatggaaagaccacagaattaacatcatcgacaccccaggacacgttgacttcactatcgaagtagaacgttcacttcgtgttcttgatggtgccgtaactgttcttgatgcccaagctggtgttgaaccacaaactgaaaacgtatggcgtcaagctgaaacttacggtgttcctcgtattgttttcgttaacaagatggataagatcggtgctgacttcgataagtcagttaagtcattgcacgaacgtttaaacgctaatgcccatgctgttcaaatgccaattggttcagctgacacttttgaaggtgttatcgacttaatcaacatggttgccgacatctacgacgaagataagcttggttctaagtgggatactgttccagttcctgacgaatacaaggaagaagctgaagcacgtcgtaacgacttaattgaagccgtagccgatgttgatgacggcatcatggaaaaattccttggcggtgaagaaatttctaacgatgaattaaaggcagctatccgtaaagctactttggacttgaagttcttcccagtttacgctggctcagccttcaagaacaagggtgttcaaatgatgcttgacggtgttattgactacttgccatcaccacttgacgttaagccttacgttgctcacaatcctaagactggtgatgaagttgaacttatggctgacgataagaagccatttgcagctcttgcatttaagattgctactgacccattcgtaggtcgtttgactttcatccgtgtttacaccggttctcttgaatcaggttcatacgtattgaacgcttcaaagaattcacgtgaacgtgtaggtcgtttgcttcaaatgcacgctaactcacgtactgaaattccagaagtattctcaggtgacatcgctggtgctatcggtttgaagaacaccactactggtgactcattaactgacccagatcacccacttattttggaaagcttgaaagttccagatccagttatccaagtatcagttgaacctaagtcaaaggctgaccgtgataagatggacgttgctttgcaaaagcttactgaagaagacccaactttccgtgctgaaactaacccagaaactggtcaaaccttgatttcaggtatgggtgaacttcaccttgacatcatggttgaacgtatgagacgtgaatttaacgttgatgctaagattggtgaaccacaagttgcttaccgtgaaaccttcaccaaggaagctaaggcacaaggtaagtttgttcgtcaatcaggtggtaaaggtcaatacggtgacgtttggattgactttactcctaacgaagaaggtaagggttacgaattcgaagatgccatcgttggtggtgttgttcctcgtgaattcattccttcagttgaccaaggtttacaagaagctatgaagaatggtgttcttgcaggttacccattgatcgacgttaaggctaagctttacgatggtagttatcacgaagtcgactcatcagaagctgccttcaaggttgctgcttcacttgctttgaagaatgctgcttcaaaggctggcgcagttatcttggaaccaattatgaaggttcaagtaactactccagaagaatacttaggtgatgttatgggttcaatcactgctcgtcgtggtaccatggaaggtatggaagacagagccggtgctaagatcatcaactcatttgttccactttcagaaatgtttggttacgcaactactttgcgttcatcaactcagggtcgtggtacatttactatggtatttgatcactactcaccaacacctaaatcaattcaagctgacatcattaagaagcgcggcggagatgctgaatagcttccgttaagaactgattaatgcagttagcttaattgaaaacaatttcatataaaaaagagttatcatttttattcaatgtcattaagttaagacattgacaattaatattagacttttaaagcactgatttaacatttaattggttaaattggtgcttttttcgtacaacaaataaggcatagcacagattctgcttttttaagctacgcgatataaataatatacagctgatttgggcttaatatttctcttgtccttgcggcctggtctaattggaatggtataatagctgatctgaataaggatccgttcaaaatcttgcgttaaagaagaagccaaatacatgctctgaataatcaagcatgattgcttgaaattgatggcatattgatacttgcaatgcttttgcggaatataggcctgtgcatcaatttgactgattgcattaaacataatcatatgggcataaatttccatttcaataaatttatcttgtttggaatggaactgtacactgcctaaagaatacttcaatttcttgaaggaggtctcaataccccaacgcagatgataaagctctttaattctttttagcggataattttttcgatcaagattggttagcacaacttcccattcttctttgcctgatttggcatcattaattctaaatttgcaggctcgaaattttattgtgcataactcgccaaaatcccagcttagatcctgggtatttttagagcgatacttaatatattggcgataatgatgctggacatggtgaatattctcactggctttatgcgtgatgtagtaatagttagaagtagttaccaggcaggaaatctcacgatcacattcttgatcaggcaatgtcgttatttctttaactccgccttgtccagccttagttcgtattatgtaatgacagttaggcaggcgattgcagttttcaatcatattgaaactagtgtagccacgatccattgttacaatatatggaccacaattcaaagctttaagcatttgaacagccgctttgcgttcatccatttctgatttaggctgaaaaatacaatcctggtaggtattattcaatagatcatataaggcattaacgtgaatttgacaatagggtttctttttatgagaagaagcttgtacaatgttattcgatttcggattccagatttgattaaagtcagagccatcaatggcaaacaaacggtagtgatgatcaaaaagttgaatattaaatagattttgattaaaaacagtcagaatatgtttaaaacaagcaggagaaagctggcttttgcgttgaacataggcagaagtactaactactttatcgttctttttagttgcatcttcgccaaaagctctaaagagttcactgtttaaattctgaccttgcatgttaattgtagttttaaggactgtcgctgcatctaaagtgcgtttcctggtaaaagcatgaggattattaataaaatcgtgaatatgatccccagtattattgataatttgatcaagacgttctagaatattcttatgaagggctttcataattaacaccatctttctggcaataattttgaaggtttaaaatatataatatataagataggcgaaaaggctggtcttttcgcctttattttatacaaaaaaagagatcgaatccaaatgattcgatctctaaaaaagcacccttaattgtcaatgtcttaacttaatgacattgcatttttattttgataactctttttttgtaaataaatttaagaaaaaagtcgtaaacccttgatatttaaggagggacaaagtacaatagtttttgtgcttatgggacagtgtgcccttaagtgtgaaaatcgttgtaaagcgttgacgcaaaaggttgcggcacgccaggctgcattgccacagtggcgtgcggggaatttttgccgagcgagtcatcttttaaagaagacgttaaggaggtaatttaatggcaagtcaaacaattcgtattagacttaagtcttacgaacatggtattctcgatgaatcagctgctaagatcgtagctactgcaaagagaactggtgctgaaatttcaggtccagttcctcttccaacagaaagaactttattcacagttcttcgttcaccacacaagaacaaggactcacgtgaacaattcgaaatgcgcactcacaagcgtttaatcgatattttgaatccaacaccaaagactgttgattcattaatgaagcttgatcttccaagcggtgtagacatcgaaattaaactgtaatttaaatagaaagaggtgtaaacatgaccaaaggaatcttaggaagaaaagttggtatgactcaaatctttactaaagatggtgtccttgttcctgtaactgttgttgaagcaactcctaacgttgttatgcaagttaagactgttgaatcagacggttacgaagcagttcaattaggttaccaagacaagcgtgaagttttgagcaacaaaccagaaaaaggtcatgctgataaagcaaagacttcgcctaagcgcttcattcgggaaatccgcggtgttgagcttaaggactatgaagttggctcagaagttactgtggatacatttaaggaaggtgacgttgtaaacgttactggtacttcaagaggtcatggataccaaggtaacatcaagcgttggggccaatcaagaggaccagaaactcacggttcaagataccacagaattcctggttcaatgggttccatcattaaccgtgtaccaaagggcaagcgcttgccaggtcacatgggtgtgaagaaagttaccattgaaaacttagtaattgaaaaagttgttgcagacaagaacgtattgatgattaagggtaacgtcccaggtgctaagaactcattaatcgttgttaagactgcttctaaagctgtaaaggctgataaataggaaggaggactagaatggctaatttaaaagttatggatcaaaacggtaaagactctggtgaagttactttaaacgataaggtttttggtattgaaccaaatgaaagtgtcgtttttgaagcaattattagacaaagagccggcaagcgtcaaggtacctcaaaggttaagaatagatctgctgttcgcggcggtggtaagaagccttggagacaaaagggtactggtcgtgctcgtcaaggttctatcagagctccacaatggcgcggtggtggtacagtctttggcccaactccacgttcatacgcatacactatgccaagaaagcaacgtcgtttggctattaagtcagttctttcccaaaagttgattgacaatgatttaattgttttagataagttgactatgtcagctcctaagactaaggaattagtatcaatgttaaacggcttaaatgctgacggtaaagttttaattgtttcagatgataacaatgtacaactttccgcaagaaacttgactaaggttaaggttgttccagttaatggcttaaacgttgaagatgctgttaactatggcaagttgatcttagatcaagatgctgttaagaagatcgaggaggttttggcttaatggacgcacgcgatatcattttaagacctgtcattactgaaaagtccacgaacttaatggatgataagaagtacacattcgacgtgcttttaactgcaaccaagacacaagttcgcaatgctgttgaagaaatcttcgatgttaaagttaagaacgtaaacattatgaacgttcgcggcaaggacaagcgagtaggtcgttacactggtaagaccgctcgtcgtagaaaggctatcgttactttaactaacgattcaaacgacatcaagattttccaagacgataacacagaagacaacaagtaataggaggtcagtcaattggctattaagatttacaagccaaccacgaatggtcgtcgtcatatgacttcttccgactttgctgagatcactaagacaaagcctgaaaagactttacttgaatctcaatcacatactgcaggtcgtaactcatatggtcatatcactgtaagacaccgtggtggtggtcacaaacaaaaataccgtatcatcgactttaagcgtaacaaggacaacgcaaaggcagttgtaaaggctatcgaatacgatccaaacagaactgctaacattgctttgcttcactacactgatggtatcaaagcttacatcttagctcctaagggcttaaaagttggcgatgtagttgaatcaggtgattcagttgacattaagccaggtaacgctttggaattaaagaatatcccaactggtacttcaattcacaatatcgaattaatgccaggcaagggtggccaactcgtaagaagtgctggtgcttcagctcaagttttaggtgctgatggtgattacactttagtaagattacaaagtggtgaagttcgtaagattttgtcatcatgccgtgcaactatcggtactgttggtaatgaacaacactcattgattcaattaggtaaagctggtcgtaagcgttggttaggcaagcgtccacaatcacgtggttctgtaatgaaccctaacgatcacccacatggtggtggtgaaggtaaggctccagttggtcgtcctcaacctatgactccatggggtaagaaggcacgtggtattaagactagagataccaagaaggccagcgagaagttaatcattcgtcaccgtaaaggtagcaagtagtagaaggagggttaattaatgagccgtagtattaaaaaaggtccttttgctgatgcatcattgttaaagaaggttgatgcacaagcagatgcagataagaagcaagttattaagacttggtcacgtcgttcaactattttcccttcctttgtaggtttgactatagctgtttacgatggtagaaagcatgtcccagtatatgtaactgaagacatggttggtcataagttaggtgaatttgttccaacaagaactttccacggacacaaatccactgatgataaagccacaacacaagcttagaggaaggagaaacatctaaatggcagaacaaattagttcagctaaggctgaagcaagaactgttcgcatcgctccaagaaaagctcgtttagtcgttgacttaattcgtggcaagagcgttgctgaagcattagcaatcttggaatttacgcctagagctgcttccccaatcgttgaaaaagttttacgttcagctattgctaacgcagaacataactacgatcttgaaagtgcaaacctttacgtatcagaagcttacgtaaatgaaggtgcaactttgaagagattccgcccacgtgctaagggtatggcttctccaattaacaagagaaccagtcacgtagttgtagtagtttcagaaaagaacgattaagggaggtatattaatgggtcaaaagattaacccaaacggttttcgtctcggtgttatccgtgattgggaatcaaaatggtatgctgacaagggatacaaagaaactttaaatgaagaccttcaaatcagaaaatttatttcagaaaagttgaaggatgcctcagtatctactgttgaaattgaacgtgcagctaacagaattaacatttcaattcatactgctaagccaggtatggtaattggtaaaggtggttctgaagttgaagctttgagaaaacaattaaatgctttaactggtaagcaagttcacattaatattgttgaaattaagaaaccagatcttgatgctaagttagtagcagatagtattgctcgtcaacttgaagctcgtattgctttcagacgtgctatgcgtcaagctactcaaagagctatgcgtgctggtgccaagggtattaaggttcaaacttcaggtcgtttgaacggtgccgatatggcaagaagagaatggcacacagaaggtcgtgttccattacaaactttgagagctgatattgattacgcttgggtaaatgccttcactacttatggtgaaattggtgttcaagtttggatcaaccgtggcgaaatcttacctactcgtaagaataagccagcttcaaagccagcgaagggaggaaatagataatgcctttagtaccaaagcgagtaaaacaccgtcgtgaattccgtggtaagatgcgtggtgctgctaagggtggtaaatatattgcctttggtgaatatggtcttgaagccctcgaatcacattggattactaaccgtcaaatcgaagcagctcgtgttgctatgactcgttacatgaaacgtggcggtaaggtttggatcagaattttccctcaaaagtcatacactgctaaaggtgttggtgtacgtatgggttcaggtaaaggtgcaccagcaggttgggtagctgtagttaagagagaaaagattatgttcgaaattggtggtgttgatgaagcaactgctcgtgaagctttacgtcttgcttcaactaagttaccaattaagactaagtttgtaactagaagttcggaagtaggtggcgaatctaatgaaggctaaagatatcagagcattaaccactgatgaaatgttagaaaaagaaaagcaatacaaagaagaactcttcaatttgcgtttccaacaagcaacgggtcaattagaaaataccgctcgcttgagcaaagtccgcaagaatatcgccagaatcaagactattctgagcgaaaaagcgttagaaaacaattaatggaagggagctattaacttgagcgaaacaaacgaaagaaatcgtcgtcacgtataccaaggtcgtgtagtttctgataagatggacaagactatcgttgtagttgttgacacttacaagaactaccctgtttacaacaagcgtattagatattcaaagaagtactacgcacaagacgaaaataacgaagctaaagttggcgatactgtacgtatcatggaaacccgtccattatctcgtaagaagcgcttccgtttagtaaagattgttaagaaatctgtttaatttgcggatttagtgaggggaggattacacagtgattcaaaacgaatcccgtttaaaggttgctgataactctggtgccagagaacttttagttattagagtcttaggtggttcaaagcgtaagaccggtaacattggtgacatcgtagtatgtactgttaaacaagcaacaccaggtggcgttgtcaaaaaaggcgacgttgtaaaagctgttattgttagaactaaatcaggtgcacgtcgtgaagatggttcatacatcaagttcgacgaaaatgctggcgtaattatcaacgcagacaagagcccacgtggtactcgtatctttgggccagttgcacgtgagttacgtgagaacgactttatgaagatcgtctctcttgctcctgaagtcttataattgatagtgaggtgcactgatgttcgttaaaactggtgacaaagtaaaagttattgccggaaaagataaaggtaaagaaggtactgttctttctgttaacgttaagaaaaaccgtgtagtggttaagggcgttaacaagattaagaagcaccaaaagccttcacaaagcaatgctaatggtggtgtagttgaatcagaaggttcaattcacgcatcaaacgttaaagtaattagtagtaaaaaagaagataagtagaagggaggacacacatggcaagttatttagctaaggaatacaacgaaaaggtagctcctgcattagaagaaaagtttaactacaagtcatctatgcaagtacctaagatcgacaagattgttttaaacatgggtgttggtgatgcagtttctaacgccaagaacttagatgaagcagttgaagaattaactttgatctcaggtcaaaagccattaatcactaaggccaagaaatcaatcgctaacttccgtttacgtgaaggtatgtctatcggtgctaaggtaactcttagaggcgacagaatgtacgatttcttgtacaagttaatcaatgtttctcttccacgtgttcgtgacttccgtggtgtatcaactcgttcatttgatggtcgtggtaactacactttaggtattaaagaacaattgattttcccagaaatcgattttgataaggtaaaccgcactagaggtttagatattgttatcgtaactactgccaacactgatgaagaagctcgtgaacttttgactcaatttggtatgccgtttgcaagatagtggaggacattaatggctaaaacatcacaaaaaatcagaaatcgtcgtcctgctaagttctcttcacgcgaatatacacgttgcgagagatgtggtcgtccacactccgtataccgtaaattcggattatgccgtatttgcttaaaggaattagcacacaagggtcaaatccctggtcttaaaaaggctagttggtagtatacggttaggaggatagcttaaatggtcatgacagatccaatcgcagattacttgactagaatcagaaatgccaacatggcaaaacacgattcagttgaaattcctgcatcaaacattaaaaagtctatttcagaaattttgaaacgtgaaggcttcatccgtgattacgaagttgcagatgataacaagcaaggcgttatcaaggtattcttgaaatatggtccaaatggagaacgtgttatctcaggtttgaagcgtatttctaagccaggtcttagaaactacgttggcgctgaagacttacctaaagttcttaatggcttaggcattgccatcgtttctacttctgctggtgttattaccgacaaggaagcaagacaaaagaacgttggcggcgaagtaattgcctacatttggtaatactgacagaaaggagaacaatcaatgagccgaatcggtttaaagactattgaagtccctgacagtgtcactgttaccaaggaaggcgacaatattactgttaagggcccaaagggtgaattaactagatacttcgatccaaagattaagtttgaacaaaaagatggtgaaattaacttttcacgttcaagcgaaagcgacaaagcacttcacggtactgaaagagctaacttagcttcaatgatcgaaggtgtagttgacggttataagaagactttgaagttaatcggtgttggttaccgtgcacaagcacaaggcaacaagattactttaaatgttggttattcacacccagttgtattgactgcaccagaaggtgtttctgtaaaggcaacttcagcaactgatgtagaagttgaaggtgtttcaaagcaagatgttggtcaatttgcagctgaaatccgtgccgtacgtccaccagaaccttataagggtaaaggtattcgttatgttgatgaatacgtacgtcgcaaggaaggtaagactggtaagtaataagtagttatttttgaggtgaaattgtgatttctaaaccagataaaaacaagttacgcttaaagcgtcatagacgtattcgtggaaaaatttctggtactgctgagcgcccacgcttaagcatttttcgttcaaataaaaacatctacgctcaattaattgatgacgtagcgggtgttacgcttgcaagcgcctcaactttggatgaaaatgtatcagatgcaactaaagtagaacaagctgctgctgtaggtaaggcaattgctgaagctgcaaaggcaaaaaacatttctactgttgtattcgacagaagtggttacttataccacggccgtgttcaagcattagctgatgctgctcgtgaaaacggattagatttctaggaaaggagaattaacacatggcaaaccgcaatgattctcgtaacaatcgcagaaacaaagacgatatcgaagatcaattagtcgctgtcaaccgtattactaaggttgttaaaggtggccgtcgcatgagatttgctgctcttgttgttgttggcgacaagaaaggccgtgtaggttttggtactggtaaagctcaagaagtcccagaagcaatccgtaaggctgtagaagacggtaagaagaaaatgatcaatgtacctaaagttggtactactattcctcatgaagttattggtcactacggttcaggtaacattttattgaaacctgctgaagctggttctggtgttgctgctggtggtgccgtacgtatcgttatggatatggctggtatctcagacgtaacttcaaagtcacttggttcaaacactccaattaacgttgttcgtgcaactatcgatggtttgaagaagcttagaactagtgaagaagttgcaaaacttcgtcaacctgaaagagcttaagattagggagatcatagatgactgatttaaagattactttaattagaagtgttgctcaccgtctacctcaacaaagaaagatcgttaaagctcttggtttaggtagagtggatagtactgttgttcttccagacaacgctgctactcgtggtgcattattaaagattgctcacttaatctctgttgaagagattaacaaatagaatatcaaggaggtgccaaattaatgaagcttcatgaattacattctgctgaaggctcacgtcgcaatagaaaacgtgttggtcgtggtacttcaagtggttacggtaaaacttcaggccgtggtcaaaagggtcaattagctcgtcaaggcggtcatactcgtttaggttttgaaggtggtcaaatgccattattcagaactatgcctaagcgtggttttaagaacattaaccgcaaggaatatgcaattgtaaacttagatgatttaaacaagttagaagacggcagtgaagtaactgtagaatcacttaaagataatggcttagtaaagaaagaattgtcaggtgttaagttacttggcaagggcgaattaaaagttaagttaactgtaaaggttaataaagtttccgcatctgctaagcaagcagttgaagccgctggcggaactgttgaggtgatctaatgttttcgaccttgaagaacgccttcaaagataaagaaattagaaataagctctatttcacgctctttattcttttgctgtatcggatcggtgcaaacattaccgttcccggtgttaatgcgaaggcgatcacgcaggttgcgcaaactggtttagttccaatgctggatactgtatctggtggtggactagataactattcaatattttctttgggtgtttctccttatattacggctcagattgttatccagctgctacagatggatattgttcctacgttagtagaatggggaaaacaaggtgaagtaggtcgacgtaaaacaaatcaagtaactagatatttagcattagttgttgcttttatccagagtattggtattacgttaggctttaacgctttaactcaaatgggtttggtaaagaatcaaacaccacagacttatatagaaattgctattattatgactgctggaactatgttattaacatggttgggtgatgaaatcactgataagggtctaggtaatggtatctcagtaattatttttgctggtattattgcaagactaccaagtggtctatggcaaatttataaggaagaaattattaataatagtgctagtgatcgttggcaaggcattttgttcttcatcgcggttatagttgcaatccttatcgtaactcaatttgttacatgggttgaacaagctgatcgtcgtattccaattcaatatacgagaagagcgacgatgagtggttctgaaagttttctaccattaaaggttaatgtatctggagttattccggttatttttgccagttcatttattgttacaccggcaacgattttaatggcctttcaaagaacccagggcgatcaacaatggtttaaagtaatgaaccaaatctttagcttacaaactactcctggggtaattatctacactcttttaattatcttatttacattcttctacgctttcgtacaggtcaaccctgagaagctagcagaaaacttacaaaagcagggtgcttatattcctagtgtatggccaggaaaagatactcaggattatatttcaaagatgttgatgaaattatcaacagtaggttcattattcttgggcttagttgctttactgcctcaattggctactaacttttggaatctcccaagttccattggtttaggaggaacaagtcttttaattgtgattggggttgttctcgagttatctcgtcaaattaacggcttgttaatgaagagagaatatgttggattcatcagataggaacggataaatgattaacttaattcttttagggttaccaggtgctggtaaaggtacagcatcagagcgaatcgttgataaatatcacttaactcatatttcaactggggatatgtttagggaagcaatggctaacaagacgaaggttggtcttgaagctaagagttatatcgataagggtaatctagtacccgatgaagttactgcaaagttggttgaggaacgtttaagtcaacctgatattaaagaaggttttatcttagatggttttccaagaaccactgtacaagcagaacttttagatggtattacaaaacgtttggagaaacctttaacaaatgtcattgcgcttgaagttgacgaagacactttgattaagcgtttatcagcaagatacatgtgtaaaaattgtggagctacttacaacaagctttccaagcagccaaaagttgagggcacttgtgatcgctgtggtggccatgaattttatcaacgtgaagatgataaaccagaagttgttaagaatcgtcttgaagttaatgaaaagatgaatgcacctttgaaggacttttatcagaagaaaggcttgctcactgtaattaatggtgaacaaactccagaaaaagtctttgaagatattgatgcggtattgagtaataatcaatagaagaaaaatttgtataattttttatccgtgttataatttcaaagtatatgactgtttaattgcggaggaacaactttggcaaaagatgatgtcattgaagtagaaggtaaggtagttgataccttacctaatgctatgtttaaagttgaattggaaaatggagccacaattttagcacacgtttctggtaaaattaggatgcactacattcgtattttgccgggagaccgtgtgactgtggaattatctccatatgatttaactaaaggtagaattacgtatcggtttataaagtaatataacggagggaaacatgaaggttagaccatctgttaaaccaatgtgtgaacattgtaaagttatcaagagacatggccgtgtgatggtaatttgctcagcaaatccaaagcacaagcaacgtcaaggttagaaatagagggggtgtagtttatggctcgtattgctggtgttgacttaccaagagataaaagaatcgttatcgctttaacttacatttacggtatcggtgaagcaactgccaagaaaatttgtgctgatgctggagtatctgaagatattcgttcaaaggatttaactccagaagatcaagaaaagcttcgtgctgaagttgacaagtaccgtgttgaaggtgacttacgtcgtgaagtaagcatgaacattaagcgtttagttgatattggttcttaccgtggtattcgtcaccgccgtggacttccagttcgtggccaaaataccaagaacaatgctcgtactcgtaagggtactaagagaaatcgttaattttatttataaggaggtttattgatgcctgcaaagaaaacagcacgtaagcgtcgtgtgaagaagcatgttgaaagcggtgtagcacacattcactcaacgtttaataatactttagtcatgattactgacgttcaaggtaatgcagttgcttggtcttcagctggtgcattgggctttaagggtagtcgtaagtctactccatttgcagctcaaatggcagctgaagcagcagctaagagtgcaatggaccaaggcatgaaacatgtagaagtttcagttaaaggtcctggtgctggtcgtgaatctgctattagatcacttcaagcaactggtcttgaaattactgcaattcgtgacgttacgccagttcctcacaatggttccagaccaccaaaacgtcgtcgtgtttaattttgtccttgatataggacgtaacgttttgaaaggggcccagtaatgattgaatttgaaaaaccaaatattaccgttgttgaacaagaagattcttacggtaagtttgttgttgaaccacttgagcgaggctttggtactactttaggtaattctttaagaagagtattacttacttctattccaggtactggacttgtttatgtgcaaattgatggcgttttacacgagttctcaacagttcctggcgtcagagaagatgtaaccaagatcatcttgaacttgaagaaacttgaattaaagtctctttcagatgaacaaaaggttattgaattggacattgaaggtccagccacagtaactgctgatgatcttaaagttgatgcagacgttcaagtcttgaatccggatcaatatatttgtaccattgctgaaggtggacacttgcatatggaacttgccgtaaagaatggtagaggttatgttgctgcaagtgacaataagagtgatgacatgccaatcggagttatcccagttgactctttattctcaccaattaagaaggttaactaccaagttgaatcaactcgtgttggtaagagagatgactttgataagctcacttttgagatttggactgacggttcaatcaagcctaatgacgcccttagttttgctgctaaaattttagttgaacactttaaggtatttgaatcagcagatgcaaatgctaaattcagcgaagtaatggtggaaaaggaagacgataagaaggaaaagaagcttgagatgactatcgaagagcttgacctttctgttcgttcatataactgcctgaagcgtgctggcattaatactcttcaagagttaactgacaagacagaatcagatatgatgcgtgtacgtaacttaggacgtaaatcattggaagaagttaaaaataaattaaccgacttaggtctttcacttcgtcaagaagactaagcttaggtgaataaaggaggcaaatccatggcataccgtaaattaggtcgcgatagtgctcacagaaaagcaatgcttagagaaatgactactcaattaatcatgaacgaacgcattgttactactgaaactcgtgctaaagaagttcgtaagactgccgaaaagatgatcactttaggtaagcgcggcgatttagcagctagaagaaaggctgctgcatttgtacgtgacgaagttgcagatgttcacgaagaaaaagatgcagttgttgttaagtcagcattgcaaaagcttttcagtgatgtagcacctcgttacaaggaccgtaatggtggttacaccagaattttgaagttagccgttcctcgtaagggtgacgctgctccaatggttattcttgaattagtttaatttagagtaacacaacttaatacgtattaagaattatccatgaaagtgagaataagcgtaaagatgatggcgcaagcttagtctagcttagatgataaaaatcatccctcttcatgggtgattttttttgctctttttttctgttacaatatgctaataagcgatttaagaaaggaagtggaaaaatgccagtagatagtgctgttgaatttaaggatgtctcatttacctatcccgatactaaaaaagcgattcttgatcagattagttttaaaataaaaagaggttcctggacatctttgataggtcacaacggtagcggtaagtccacaatttctaaattaattaatgggttacttttgcctgattctgctaataattctagaatcactgttttaggaatgacgttaaatcaaaagacagtctgggatgttagggaaaaagtcggtattgtatttcagaatccagataatcagtttgttggagctactgttggcgatgatgttgcttttgggcttgagaatagagctgttcctcgggagcaaatggtaaaaatagtcagaaaagttttagcagacgttggaatgctggattatatagatgcagagccagctaatctttctggtggacaaaagcaaagagtagcaattgcaggtattcttgccgtagaaccgaaaattattattttagatgaatcaacttcgatgcttgatcctaaggggagagagcaggtgctaaaaattattaagcatttaaagaaagagaagaatttgacagttatttcgattacacatgacattgatgaggctaatatggctgataatgtgatcgtcttaaatgatggcaagattttagctcaaggaactccaacggaaatttttagtaaaactgaaatgttgcaagaaatagggctagacattccatttgtacaaaaattaataaataaattaaatgaagtgggaatttctgtacctaaaaatataaaaacgaaagatgagttgaaacaatatctatgtcaattaaatttgaaaaagtaaattatatctattctcccggaacttcaatggagaaaaaaggattagataatgtttcatttgaattaactgaaaatagttttgttgcattggtaggtcataccggtagtggtaagtcgactttgatgcagcattttaatgcattactgaagccgagttcaggaacaattgatattgctggttatcatattactgctcaaacaggaaataagaatttgaaaaagttacgcaagcgggttagtttggtttttcagtttcctgaagcacagctttttgaaaatactgtgcttgaagacattgaatttggtcctaaaaactttggagcaaccgatgatgaagctaaaagtaaagctttgaaatggttgaagcgagtaggattggataaatcgctagcaaataagtcgccatttgagttatctggaggacaaatgcggcgtgttgcaattgctggggtaatggctgatgaaccagaaattttatgcttagatgagccagcagcggggttagatcctaagtctcgtaaggaaatgatgaaattatttgttgactatcaaaaagcaggtcatactgtaatcttggttacgcataatatggatgatgtggccgaatatgcagatgatgttttagtgatggaacatggtaaattagttagacatgatgcgcctaaggcgatttttactaataaaaactggctagaaaagcactatttgagtgaaccaacggctagtctttttgcctcagatttgacgaactttaactttaaagataaaccgttaacactggatcagcttattaatgaaattaagaaaaatttgcgagggtagtttatgagtaagataattgtaggacgttatattccgggagattctcttatttataaaatggatcctcggagtaaattattagttaccatattatttatattggctatctttttagctaataattcaataacttatgcgattgtgaccattttttgttttttggctgtgatcgctacaggattaaatgcaaaagtattttgggatggcgttaagcctttgattggtttaattttctttacgtcgcttttgcaattgttttttatgactggtggtcatatttattggcattggtggattttttcattatctagctatggtttgattaatgcaatctatatttttattcgttttacattaattattttaatttcaacagtaatgacagttactacaatgccacttgaaattgctgatgcgatggaatggctgcttaagccgcttaagttgtttaaagtgccggtggataaaattgcgttagtaatttcaattgcgcttcgttttgtaccgactttgtttgatgagacttttaaaattatgaatgcgcaaagatcacgtggagcggacttcaatgacggtggtttaattcaacgtgctaaggcaattacgcccattttggttccgttgtttattcagtctttagaaacggcaattgatttatctacagcaatggaatcacgtggttatcgtagtagtgaaggacgaactaaatatcgcgttttaagttggtcaaaatatgatttaattgcattattttattttgtactgttagtcggattactattaacttttaggacatattagaaatatgacgacaagatataaaatgacgatggcttatgatggtcatctttttcatggctttcaacttcaaccagaccagcgaactgttcaggggacaattgaagatgcgttgaagaaaatgactaaggggcagcgtgtgattgtgcaggggtcaggtagaactgatgccggtgtacatgcggttggacaggtaattcattttgattatcctggtaaaactattccagccaatcgaatgattttggcaatgaattctatgatgccaaccgatattatctttgatgattgccaaattgttgatgagaattttcatgcgcgttattcgattaaggggaaatggtatcgctatcgtgttagtttagatcattttgttaatccatttaaacgtttttatacaggacattttccatatccactagatattgaaaagatgcaaattgcggcacaagatttgttgggaaaacatgactttactagttttgcggctagtggtggtcgaattgaagataaagtgcgaacaatttattatgtaaaaatcacagaggataaaaaagataatgaagtgatttttgacttcattggttcaggattcttatataatatggttcgaatcatggtagcagcgttgcttgagattgggaatgatcgtagaccagtgcatgatttgcagcgggtaatcgcggcaaaagatcgacaagaagtgagacaaacagctcatgccagcggtttatatctttatcatgttttttatgatgaagtaccacaaaaatatcgcttagatcagcatttataattgacattttgcctaaaaggacgtactctaatatagtatgtttgtccacgataggccccggaaacttattgttttcaaactgcaaataaacggaggaatttaaattgcgtactacaccattagcaaaatctagtgaaatcgaacgtaagtggtacattattgatgcaactgacgtaacccttggtcgtctttctgctgctgttgccactattttgagaggtaagaacaagcctcaatacacacctaatgttgatactggtgataacgttatcgttatcaacgcatcaaagattagattgactggtaaaaaggcttcagacaagttctactaccaccactcatcatggcgtggcggcttgaaggccgtttcatacggtgaattgcttgctaataacccagttaagatggttgaaatctcagttaagggtatgcttccaaagaacactcttggtcaccatgaattcatgaagatgcatgtttatgctggcgaagaccacaagcacgaagcacaaaagcctgaaaagttagatattaacaaattaatctaggaggttatataatggcacaacaagctgcatacacaggtactggtcgccgcaaggattcagttgcgcgtgttcgtttagtaccaggtaacggtaagatcactgttaacgataaagatgttgatcaatacattccattccctaacttggttaaggacttgaagcaaccattgacattaactgaaactgaaggtcaatacgacattcacgttaatgttaacggtggtggtttctcaggtcaagctggggctatccgtcttggtatcgctcgtgcacttcttgaagttgacccagacttccgtagtccacttaagaaggccggtttcttaacccgtgacccaagaatgaaggaaagaaagaagccaggtttgaagaaagcccgtaaagcttctcaattctcaaagcgttaatatttacgttcaaaaatgttgttatatcaacgttttggagacttcagttggtcacctatggtcacaatgctatagggattccaatagatttaaagcattcgcatcttgcgagtgctttttttctggcattaattccagatagtatttttcagtagttaagattgaatcgtgtcctaatcttctgctaacataagataaaggaatattattactgaataaaaaagaagcgtgggtatctcttaaaccatgaaatgtggttgaagggatgcctatttttttgagcaattcttttaacataccagactgtttaaagctgaaccagtcaaacaaatagccagaatctttttgagagatatccttcaatagatcgtaaatattcttaggaatagtcacactgcgtctagaatgtttagtttttaatttagtatcgtcagtagtagggctaattgatcgttttacttcaacgcaataatactgaccatcgtaatgcacatcctcaggcttaatacctaaaatttcaccacgtcttaaaccagtactaatctcaagtaataccattaagttaaattcattatctgtatgttcaagtaagtaatgttttaacttagttagatcagacattgatgaagctttattgcgtttaggtaattcttttccgtgtgctttaagtaaactagcaaaatcattgtaaatgtatcccttaacataagcatagcggagagcagttctaattttcttaagtaattcagttaccgttttcttagaatgtgttttgccatatttatctaagatactttgcatttgtacgtcatcaagcttaccaagtttagcggttggaaaaagattatcaattactttaccagctttaacataattatcaaaagttgcttttctaacgtcatgtacttttactgtttgaacgaataaataataaaagtccttgaataaagtgttttgctgggctattgcttgacctttagccttttgtagttcaagagtagtactccaaactttagcttctttttcagttttaaaactcttagttaagtaatcacgttttccgagactgtaaaatagtttgtgtaaggatgaatgattccttaaatttatttctttaaacattagaaaaaggagttcctttctcgtatgattggtttgaacaaaaaaaacacatacagaaagaagaactccttcatgaatgattttaccaaagattttgctcaagctctattcaatccagacaaaataaatgatttattgcgcaaagaactacaacaggctgttaataacttgctagaagctgaattgactgcctttctgggctatgatccctatgccagaaatggctggaatactggcaactctagaaatggtgcttatttccgcaaagttgatacgcaatttggcccaattgaagtgcaagtgcctcgggatcgcaacggtcaatttcatcagcacacgctgcctgactacaagcagcactcggatatcttggaaagcatgattatcaagctttactccaatggcgtgaccaccagggaaatagccgatctaattgaaaagatgtatggcagccattacagtccagctcaggtatcaaatatttccaagcagatgattccaaaggttgaggcttaccacaaacgcaagctaagcgacaagtttttctgcgtctatttggatgcgacataccttcctttgcgccgagaaacgtttgagcgtgaagcagtctatattgccattggcattaaacctaatggacataaggaagtcattgactactgcattgctcctagtgagaacattgaagtctggacagagatgcttcaaaacatgaagtccagaggcttgaagcaagttgaactctttctttctgatggtgttgttggcatgaaaacagccttggccaggacttatcctaaagctcattttcaacgctgtttggttcatgtcatgcgcaatatctgcgctaaagtacgcgtcgacgatcgtgaaaagatcatgaacgaattcaaacaggtgcatcaacagacaaacaaaaaagaagctgcagctgtcttgcacaaattctatgccaaatggaataaagcttatagccatgtcatcaaaggtttgaaggaaattgagcccgatctgctagtcttctacaattatcccaaacaaatcagagcttcaatttattcaaccaatatgattgaatcctttaacaacgtcatcaagcgtaaagctaagcctaaggcagaatttccaactgaacagtcgcttgatgcatttattggcatccaggcaatgagctacaatgaccgttatttcaatcgaattcataaaggctttggtcaggttcaggacaccttagaatcctactttgattaaataaataattaaaaaatcaatttacgagaaagatctatttacacaaaagatttgacagtttccgttttccatgttgatagattgttactctggctctatatgatgagccacgtttttcaatacttgccataaatttaatcgtcctttcaaaagaaaagccgattatcttaccagcaataaagttagcagataaccgactatttctcaaatctttttcaattttgtttctttaagatcgatgaaagcttcgatacttttaatggtaaagcgttctgtgtgttctcctagtttaaatcttttaaagtcaggatcagagcgaaatactttatcaaaagttttgggatcaataccaatatattttgaagcttcttcgcgagttaataatttagccactattattctcctgagattgtttagttaccaatattgagataaaatctaggtagtaggtaatctagtcattgcttttgtctctattagcatgactagtatttttttgcgattttatcttccaaattgcttcggataatttatcatcagtgattagatcatttttaactttattagtattgcttttagtaagttgcaacgggataattcgtcttttcaactgttcaaaagaatcaatgacttgattagcaatattacattcaagataaaaactaagtggatcataaggggtagtgatgtaaatggcacgcgcatttagataacgatcgtgataccttgcgggagccattttgtctattttccaaggatccaaaagggtaagtagttgaccatagtcatagtcatttggtcgcaagtcattaattactatgaatttttgccctttgtattcttgaaagtgatcccgttgactacctgaaatacagaaatcttcaggatgttgtttttctaaaatttcccgtactaacttagtcttaccaattccggaaacaccatatatccagtagaccttacaactctgacctttgaagtcctttaaaaaccgttgatgctttttgtaagctaggatgtcttcaatatgatctaacagtgttttatgttttgccatctcaagaacaccgatttcttcttgaagttcttctttagtgattttttcatttgaataatcatcaataaagttttcaattgcttgtcgtgatggctttttgactttttgtctaatctcattgattctatctttaaaatcaaatgaagctactacttcttttggatcataatgatgtttactcttagcattagtagtttcatggatcagatagctatagccattgttaataatactgtgccatgcttcaatatattgttcatgatcattgaaaatcttagatactcttgaaatggttttagcatctttgaaatgaagcattacatgatagtgaggtcgaatcttttaacttatctttactaaatggtaaatgatctaaatcttgggtatacataaagttgtgagaacgtattatttttttcacaattaaagatttcctttctattcaacacgaactacatattaactttggggctagataacaagttcattattactttatttttgtttatcagatggaaagcaattgcaagaagcagcagatatattagccaaggctaaggtgcatctatctatggtgatattttcaccttaaatcaaactgcagcagctatggttaaagttgctcaaggaggtaataagggtaaagtattactgcaaatgaatgaagcttaagttaacatgaaataataaatacatttagataaagaaagaccctcaaagattctaaatttgaatttttgagcgtctttttagattgctaatcattttaaaggtacttgtattacatttactcctgctttaataaattcattaattacactgttttctacaaaagtatcagttattaataaatcaatatcttttattgttccaatagtaaaattagagaatttattgaacttgctatagtcggcaacaacaataaccttttgtgattgctgaataatagttttattaacttctgcttcttccataactggtgttgaaataccttggttaatgctaattcctgcgcaaccaataattgcatagttggcacgtaaagatagaaatgctttagttgccaaatcaccgctcatgattaatttatgatgtatttccccacctgttaagatcactttgcttttagtattttcaaaatttccagcataaccattgttagtaacaattattatatcctttgttaataaatgtggaattgcatcaaaggctatactactagagttaataaatactatatctccatcgtgaatatatctggctgcctcttttcctaagctttgcttaatgtaactaacgggctgagataatgggatttcttctggtgcaacaagggatatgacaccacgcttttttgaaatcttacccatttttgacaaataatcacagtctcgtcgaatagtcatttcagaaaccttcatctttttgcttaattcagaaatagaaatttcccttgtgtgatttagtaaatcaatgatttgcttgcgacgttttttaattacttgaattgaatttttcatttttaatgatctctttcacttcaataaatacttactaatacttcaccagaaaagcattaacttttgaatttaaataaaaaacgacccgaactggttactattttaccattcaaaataataattcacatattttatgttataaagtaagtgtcaatgtttttgcggtagcctttaaaccattagtctaaccttaatttcttaaatatttatatgacttaaatttctgcttagcttgcttaaataactattgccagctacctgtgcggttaatgcgccatgctggatgcctaaatgaacttcatgacgcttctttaagctgtcacgggccgctgcttttaattcctgttcagtcaatacagttatttctgaatcttcaaactcgctgctaagccaaaattccagctctcgattcttgatgcagcttaagatcctaagcatgccttctgctccagattttgaccatttcttgccttgccccttaacacggtaggtatacttgcggtggttgctctcgcagcagccaatggctttagtcacagtcagttttcgtttcttaaacggcttaatatcgtcccaatgacgatcaatataattccttaggcgccccagataatcatgattgagctcggtattcaattcatcaattagtcggctttctgcagtggttaggatagttttaactttgtcatagctgtatttgtattccaaagcagaaatcagcttgccttgcaggtcaggcgcaaaatatagcctttctttgattttcttatttaggtgaaagacatccaagaaatgctcatgacgcttgcatagccctacaatgtcatcgaagtctgttttggcatatccagcaccgccatcggcgttgctaagaattacagtatcagaaagatcataagtattggccaggtactccttggcttcgttcagcgcatcaagtcggcttaaagaaacaaattccttggcattgattcgctttctgcgtttcttgcttatattgacaatgccttcacagacctgatagcgatgaaattccaaccggcttttagtgcctttgatcaccacgccatcgccttcaagatacaaaactgggacctttttcttagtgcctgcggcatcatatcttgaatctgcttcttggcccgctttaatatttttcccggccatttttaccaaattgcccacctgcatatggctaatattaaagccagacaggcaattgactgctagagcagtattgcgataagtggcaacgctgcttacttctaagatgtttttgactgctaaaatactgtagcgcttgtatttgtaaaagcccattaattcatccaagggataccttgcttgtttgcctgggcagacatatcttcttctgacatacctaacttcgccaaaagccatattgattgagcgctcattcttcttatcaatctgatagccctgtgctttaaccttggtaatcatttcatcatcaactttagctaaagccaaggccatgatttccttaatcaggtttaagaagaaacagattatttttctttcacgcttaatataattatcttcagactttataatatttgcgatttcagttacaattgaattcataaaagaccagcttctaatgtgttttttgttcttaacatcagactactggtctttttgtttgagctcaagtccaaattcaaaggacttgggcttttttaattatttattcaacttaccgtaaaaaattatacacttagtgttataaatgacttgaattttacaaaaattaacataaaatatgctaaattaacatatataatggttgaaagcactcacatctaagcgcataataacattgaagacgaggataagaaaattaaggaggatttattcatgtcagcaccaaaaaaaatagaagatgttaatttcaaaacttttgcagaaaacaatttcccagaatggggtacgttcttgaatgaacaaattgctgataagcaagtaccagaaaaaagtattgcaatgtggtggttaggctgtatgggggtttggattaagactcatgaaggcaccaacgttgctattgatatgtggaacggtactggtaaacatactcacggtgacggtaagatgcgtaaaggtcaccaaatgatgcgtatgaccggtggtgaagctttacaaccaaaccttagaaacaagccatatgtaattgatccatttgcacttcgtgatcttgatgctttatgtgtaactcacactcaccatgatcacttggatatttacactgcagcatgtgtaaacaagtattgcccagacgctaaatttattggacctcaaggcgttgtcgatgaatggatcgaatggggtgttccaaaggaaaagaccattgttgtaaagcctggcgatgaagtcaaggttggggccgtaactattaaggcaatggaagcctttgatagaactgaatttgttaccgaagatgatccaaacaagaagttagcaggtactatgccaattgaaatggctaaagttgctgttaactacttagttaagacttcaggtggtaacgtatatcactcaggtgactctcactattcaaacacttacgtaaagcacggtaacgaaaacgaaattgacgtaactctatgtgcatacggtgaaaacccacgtggtatcactgataagcttgacgactcacaagttttgagaatgggtgaagctttaaagacaaaagttattattccaatgcactatgacatttggactaacttctacagtgatcctaaggatattttagctctttgggaccgtaaaaagtaccgtttgcaatataaatttaagccatatatttggcaagttggtggtgaatttgattatccacaagacaaagataatttcgaatacatgtatgatcgtggattccatgatgcatttaagaatgatccagacttaccattcccagaaatgctatagtcccgtttttgttgattaactagctcaacgtctttaaccaaagctgttgagctgagggaggagacgctgatgttacgttactttttagaaaataatttattaaacattactgatgaacatcctgagacttgggaagaagcaattagagttgctggtaaggtaatgaagcaagacaagttagttactgatgattatattgattcagttattgctgatgttaagaaatatggtccatacattgttattgttcctggtgtggcaatgccacactcaaaggctgatagcgaaggagttttaggtactggtataggtcttacaattttgccagaaccagtttcattcgatgaatcagacccagataaaagtgcaaaattattctttatgctagcagctaaagataataatacacatgtcaaaaatattgcccatttatctgacatgttaatggaagataacatgattgatgatctttctaaggttaagaatttagacgattataaggcagtaatgaagaaacataatatgtgatatcggaagcggggagtataaatggctatattaaatattctatctaagatatgggattattttgctaccaatattttgcaacaaccagctttcatgattggttttattgtcttacttggttatatcttagagaaaaagaaatggtatgaggtcctttcaggcttcttgaaagcaacagttggatactttattttatcggctggttctgttggactgatcaatacttttagaccaattttagtcggattaaaagatcgttttcatttgaatgcgatggtaactgatccatattttggacagaatgcagttgctgccggaattatgaaagagtttggtagatcttttgccgatactatgcttttgttgttatttgcatacattatcaatatcgtgttagtaagattttcaaaatatactaaattacgtgctgtttttacaactggtaacgtgcaagtacaacaagcggctaccgctttctggttgatcttgttctgttttccaaaattaggtcatttacctattttaatcgttatgagtattatcttaggtttatattgggccgttggttcaaacttaactgtagatattactcaagagttaactgatggtgctggctttgctatcgctcaccaacaaatgtttggtatctttattttcgctaaattatcagaatttttggaaaatagagccaaaaagaaaggtaagaaagaagccagacgattagaagatgtaaagttaccaggtttcatgtcaattttcaacgacaatatggtatctacatcaattttgatgttaatttttatcggtgcaattttagtagtattaggtccagattacttagttaaagctaaatttatgcaacctggccaaagttttattttctacatcttacaaacttcattacaatttgcagttttcttagcaatcttacaattaggtgttcgtacattcgttaatgaattgactgaatctttcactggtatttcagacaaatggttacctggctcagttcctggtatcgatgtcgcagctaccttaggttttggttcacctaacgcaggtacaattggtttcttgtttggtgcattaggacaattcacaatgatcattttattgttgattttccactcaccaacaattgttatcgccggatttatcccgttattctttgataacgctgctatcggtttgtattcaaataaccgtggtggtttcaaatatgcaatgatcatgccttttatttctggattgatccaaataggcgggtctgccttaattgctacctgggtaggtatggcgaaatacggtggttacatcggaatgttcgattgggctacagtttggccattcttcacagtattgatgaaattcttaggctttgttggtatttgctctttaataatcattttggtaatgattcctcaattgcaatatcgtgccgataagaaaggttacttcatgattactgaagattatgaaggttggaagaagttacatggtaaagaatagaggttaattaaaatgaaaataatgtcagcttgtgctaatggttcgggaactagtttaatgctttctagaaccgcaagaaaagcaatggaacaattaggttatgaaattacagtttcagatcatacttctgtttcagaagctagaggaactgctagaaactatgatgtggtatttacatcattaccttttgtgaacatgtttgatgaagtaaagcaaaagggtggcgaagtaattggcgttaagaatgtaatgtcagttcctgaagtaaaagaaaagatcgaagcttcagatattccaaataagtttaagaaataatcttaggagaattaatttatggctttaccaatgttacaagttgctttggattgcgagagtactgctgaagctttaaatgtcgcaagacaagtaatggatcaagttgatgttttggagacaggaaccattctttgttatcaagatggtgtaaaggccgtatctgctttaagagcagtgggaccagataaaatagttttagcagatgttaaatgtgctgatgccgggactaagttcggtaaggcaagcaaagatgcaggtgctgattggatgacttgtattaacgctgctactgttcctaccatggttaatgctagaaaagaaattgaagttcaagttgaattatatgaaggctgggacaataaagaacgtatgcaagaatggcttaacaatggtattgatcaagttgtttaccaccaaagtagggatgcaaaatttgcaggccaaaaatggggcgaaaaagatgttgcaaacgttaaggccttgattgacatgggctttaaggtttcagtaaccggcggagttcatccggaagttttgaaattatttaaagacttaccagtgtattgttttattgccggccgtgatatcagaaatgcggaagatccacatgcgcgtgctaagcagtataaagatgaaattaagcgcatttggggttaatcattaattttactcatattaaaaaattccttaattagttttagaaagggcaatgcacgtaaaaacgtttattatgcattgctctttttgtattaaaaggcaggtataggttatgactgtaaactcattaggtatttacgaaaaagcattaccacaagatttatcttggaaagaaaaatttaatttagttaaaaaattaggcttcaattttttagaattttctgtagatgaaagtgatgcacgcttagcacgtttggattggaccaaggaacaaagaaaagaatttagagatttaatgtgggacactgacattcgaattaataatttgatgttatctggccacagaagatttcctcttggatctaaagatccagaaaccagaaagaaatctcttgaaatgtgccaaaaggcagtagatctctgtgtagatttaggaattcataatattcaaatggcaggctatgatgtttattatgaagaaaagagtgagaactctagagaattatacgttgaaaacttagctaaatgtgttcatatggctgcaaagaaaaacattatgctttcgattgaaacaatggatgatccatttattactaacattgcagatattaaacaatataaaaagcaagttagaagcccatggcttcaagcctatccggatttgggtaacctctctgcttggccacaaaatgatcctgctaaggatttagagaatggaattggtaatattgttgccatccacttaaaagatactctggcagtaacagatggttttgagggtaagtttagagatgttccatttggtgaaggctgcgttgattttgaaggactacttcgtgaattagtaagactagactataacggaagttttacgattgaaatgtggccaggtgataacggtgatgatgatcctgttgctgaagttaaagaggccaaagctttctttgacaagatctttaaaaaagttggaattgaacaagaacctgtagattagaaagtggaaaataaaatgttagaagatttgaaaaaagaagtctatgaagccaatatgcaattacctaagttaaatttagttacttttacttggggaaatgtttcagggattgatcgtgaaaaaggtctgttcgtcattaagccatcaggtgttccatatgaagaattaactcctgaggatatggtagttgttaacctaaaaggtgaagtggttgaaggtactagaaatccatcttcagatactcctacacatacctatctatataatcattttcaaaagattggtggtatcgttcatacacactcaccttgggctgtttcatttgctgcagctaagatggatattccagctttgaacaccacacatgcagatactttctatactgatgtgccagcagctgatgcattaactaaagaacaaattgaggaagattacgaaggtaatactggtgtcactattgtcaaaacctttaaagagcgtggtctcgattatgaagcaacaccaggtgctttagtttcacaacatggcccatttacttggggtgaaacaccagctaaggctgtttataatgctaaagtcttagaagttgtggcggaagaagactatcatactttgcaattaacacgtgctaattgccatttaccacaatacctacttgataaacactattatcgtaagcatggtaaaaatgcttactatggtcaaaataatgctcattcaaaagatcatgcaaagcgtgcctaaaactaaggggtaaaaaatgcttgaaaattatttttttgattttgataaaactctggctagttcaggtaaggcgtcattgattgcgacaaagcaggcatttaagttaaataatttagatgagccagatgatgatcaaattttagattttatgggtattcctgctgatgtttcattccctaaaatggctaatagagaattgtcagaaagtgatgcgaaaaaattagttgatacctaccgtaatatttatggaaagtatgaaaaagaaaatacacatttatatcctggaatgcgagatgtactagaggatttacagcaaaaaggtaaaaatttatttgttgtatccagtaaaagtcatgatattttaaagagaaatttagataatttgaaaattactcaatattttaaagactttgtgggatgcgatgaggttcagcattataagccagccccagatggtattttgatacttttagacagatacaatttgaataataaacaaagtgtaatggtaggggatgctcgttatgatttgcaaatgggcaaatcagcgtctgttaaaacttgtggagcagcttgggatgcttttagtgtggatagcttaaagaatgaacatcctgattatttgctatttcatgtggcagaattaaaaaatattgaatagagttcatatattttaaaattggatggtatcaattttgaaagtagttgaactctttagcaaaaatgatattattaacttgtaagggaaaacggttacataacgatggtctataggaggacatcatggctgtagattacgattcaaaagaatatttaaagagcgtcgatgcttattggcgtgcagcaaattacttatcagttggtcaacttttcttaatgaaggccccacttcttaaaacacctttagttgctgaagatgttaagccaaagccaattggtcactggggaactattgctccgcaaaactttatttatgctcacttaaacagagtgttaaagaagtatgatctggatatgttctatattgaaggttcaggtcatggtggtcaagtaatggtttctaactcatatctggatggttcatacactgaacgctatccagagatcacccaagatgaaaagggtatggctaaattgtttaagcgcttcagtttcccaggtggtgtggcatcacatgctgctcctgaaactcctggatcaattcatgaaggtggggaattaggttactcactttcacacggtactggtgctatcttagataatcctgacgtcattgctgctgttgaaattggtgatggtgaatcagaaactggtccacttgcagctagttggtttagtaacaagtttattaatccaattaaagatggtgcggtattaccaattttgcaaatcaatgggtttaagatttctaatccaactattgtttctcgtatgagtgacaaagaattaactgaatacttccgcggcatgggctgggatcctcattttgtttcagtctttaaaggcggtcgttttgacggtgaaaaggatccaatgcaggttcacgaagaaatggctaagactatggatgaagtcattgaagaaattaaggctattcaaaagcatgcccgtgaaaacaatgacgctactttgccacattggccaatgattatctttcaatgccctaagggctggactggtccaaagaaggatttggatggcaacccaattgaaaactcattccgggctcaccaaattccaattccagttgcacaagatgatatggaacataaggaaatgcttgaaaaatggcttaagagctacaagccagaagaattattcaatgaagatggttcacctaagaagatcgttactgaaaatacggctaagggtgaccacagaatggccatgaatccagttactaatggtggtaagaaccctaagcgtttgaacttgccagattaccgcaagtacgcattgaagtttaagccaggtcaaatggaagcacaagatatggttgaatgggctaaataccttagcgaagttgctgatcttaacccagacacattccgtggctttggtccggatgaatctaagtcaaaccgtttgtttgcacttcttgatgatcaaaagcgtcaatgggaaccagaaattcatgaacctaatgatgaaaacctagctccaagtggtcgtgtaattgattcacaattgtcagaacaccaagatgaaggattccttgaaggctatgttttgactggccgtcatggcttcttcgctacttacgaagcctttggccgtgtagttgattcaatgcttacccaacacatgaagtggttaagaaaagctaaggaacaatactggcgtcatgactatccatcacttaactttgtcgcaacctcaactgtcttccaacaagaccacaatggttacactcaccaagacccaggcatcttgactcacttatatgaaaagaatcgtccagaccttgttcatgagtacttgccatcagacactaatacgcttttggcagttggcgacaaggctttgaaagacagagaatgcatcaatgttttggtaacttctaagcagcctcgtccacaatggttctcaattgaagaagctactaaattagctgataaaggattgagttacattgactgggcttcaactgatcaaggctataagccagatattgtatttgcttcaactgaaactgaaccaactttggaaagtttagctgcaattgatatcttgcacaagcgtttcccagaccttaagattcgttacataaatgtagtagatgtgatgaaattaatgagtcctaaggataataagaatgctatctctgataaagagtttgatcgcttattcccaagtgacattccagtaatctttgcatggcatggatacaagactatgatggaatcaatctggtttgcaagaaaccatcataatatacatattcactgttacgaagaaaatggtgatattactaccccatttgacatgcgtgtcctgaaccaccttgatcgtttcgacttggctaaggatgctgttgaaagtattccatcattggcaggtaagaatccagacttcatcaatgaaatggatgacttgcttgctaaacaccaccaatacattcgtgataatggtaaagacattcctgaagtcactgagtggaagtggacaggtcttaagtaaaaaataaagtgtctgggaaaaaactaactcttagaccataataataggacgatcaaaattcttaagtgagttttaatcgtccttttttcttttaaaattaaataaaaacggtcttttggtcattttctgttccaatatttgcttatattcatcatcatgaaggctattccaacatcggtttcaactttctttttgcctcttagatgtgtttgccttcttcgctttgaagaacttcttttgctttttcttttaaatactgccagttagggttatagcgtacttgacgctggcgaccgctagctgtcttagctaattgttccagttctgacgtaagcttcaactgcctggcccttcagcttatcatgatacttttcgacagccttgcgccaaacaaaagtgtagcggttagcatcagcttcaattttagtgccatcaataaaaacagccccctcgttgatcagccaacagattggtaaagtagataaagctcttcttaaccagttcattggcatgactgctgtgtggtatactggtcgacctgttttagcagggtgtaaagcagaatagcttctggaatcgaatccacaatccagctgatagcattagccaagtgattgctgggaatggtaaaatccaaattgagtgttaaagctgtttgacctgtgatatgatttttgtacatattagtttccacctttttgttttaatgaaataagaggccacaaatgatcacattttttatggagaaatttaaaatgttaaattttagatcatatgaagacgcagatttcgaaaaattatgcaacatccacgatcaagcgcgaaagcaagaattaaaatttgccaatcttgaagctgcatttattccattcaaaatagcatcaaagaaagagcaattatttgaagactatcaagttcctgaattgtcaaattaagtgcaacagttaggttatgaagagatatattgcttgaagagttcctctgctgtgtgatattggaggattcggcgatatttgtggttaatggcatcagttgcctgttgaacataagcttttgacttgtctttcatgctcttgcccttagggaagaattgacgcaaaagaccattgcagttctcattggtgcccctttcccatggagaatatgggtgagcaaagtaaatctggcagcccttgatcttggtcatatccgcaaactcagagccattgtcaaacgtgattgatttaaaccaggcaggatgtctgtcaatctccttttgaagcagcctttggcatgtgcttgcccgatagtcaggaatcttgataactacttcaaagcgtgtggttctttcagtcaaagtcattaaagcaggctgattcttgcgtctgacgcctttaaccagatctccttcccagtgcagcggagcttttctgtcttcaacctccttaggacgctgttcaatggaattgccaagatgcttcttgtgcaaagcgtgaccgccatggctgtgatgacgcttgttcctgcgtcttttgagcttcataggcagatcaatattgcttatgtccagcaagccctgatcaatatagcgatagacggttggtgtgctgggacaagggtagcctggcatagtcctttggaattcaccaacgaactcatcgatgctggtggcatcaaatttagctttaaagcgtctggagagcattctcaaaaagacagcataatgcttcaatggattgcgctgatagcagtttttgcgacgcttctcataataaatctgtgcagtatcagcgtaatagtgctcatacaataaatagctgctgtctctttgcaggacgcttccgcgtttgatttcgcgactgattgtcgacttatggcagccaacttcttgagcgataacagtacgggaagttatgccggaatccagcattgcttgaatttgtccacgttgtacgctggttaattgatgatagtgcttagaaatgctagaatttgaattggtcatgaagatcttcctttcttgatttttcgtcacttcaagtttaggtcttcatggcctttttgtttaacacttagtgttgcacttcaattttaaatccgggagactatcaagtttacgttgcaacaaaagaaaataaagttgttggttttgtcggatttaacgaagaagagcttggctggctctatgttgatcctaaagttcaaggacaaggtattggtagtaaactgattgattttacgcttgaaaattcgaccaggccattttatttagaagtgcttgagggcaatcctgcacaaaagctttatctcaaaaaaggtttcataacaattaaacatgaaagtggcaagatgccaggtaatgaatcatttagtgttgaagttgacctaatggaatataaataaaacatcccaatcaggtgtgttttttgttagacttataaaaaatgaagctagtcaataaagtattgtcttgtcattagaaagtactacatatgaagtatatttcatgaagtccgcttcatattttagggatgatgattatcaataataaaattaaggaataccgcaaaaaacatcaacttacacaacgcgagttagctgaaaaagttggtgttacagaacggacaataatttcattagaaaagggtcggtacaaaccatcgattgttttagcttataaattagtacaattttttgagacagatattgaaactttattttgcttaaatgagtatgtgaagaatgagcaagccaaaggaaggaatgcttacaattctttttgcgattctatcagtcatacagctcttagaattaatttatgatgttgcaaatagaaaaagcgtcaattatattcaagatgttatttggttaatattgggcatctgtttgacagtcggttatttctatagtactaaatatatcggtatagccaagattgaagaagatgatgaacgcgataaatttattcaaactaaaactaataatcaagcattcaatattttacagtgggtcctttttgttttaggtgcagtaacgataataattgatgttaatctcggccaaatgggattagattctcgtgcaatggttattatagttgtaggcgttgtattaatctttttatgggcattttcttggattttgcaattaatcttaatgataattaattatttttgcaattgagactacaaaaaataaagcgactggattagctccaatgtcattaagttaagacattgacaattaatattagacttttaaagcactgatttaacatttaattggttaaattggtgcttttttcgtacaacaaataaggcatagcacagattctgcttttttaagctacgcgatataaataatatacagctgatttgggcttaatatttctcttgtccttgcggcctggtctaattggaatggtataatagctgatctgaataaggatccgttcaaaatcttgcgttaaagaagaagccaaatacatgctctgaataatcaagcatgattgcttgaaattgatggcatattgatacttgcaatgcttttgcggaatataggcctgtgcatcaatttgactgattgcattaaacataatcatatgggcataaatttccatttcaataaatttatcttgtttggaatggaactgtacactgcctaaagaatacttcaatttcttgaaggaggtctcaataccccaacgcagatgataaagctctttaattctttttagcggataattttttcgatcaagattggttagcacaacttcccattcttctttgcctgatttggcatcattaattctaaatttgcaggctcgaaattttattgtgcataactcgccaaaatcccagcttagatcctgggtatttttagagcgatacttaatatattggcgataatgatgctggacatggtgaatattctcactggctttatgcgtgatgtagtaatagttagaagtagttaccaggcaggaaatctcacgatcacattcttgatcaggcaatgtcgttatttctttaactccgccttgtccagccttagttcgtattatgtaatgacagttaggcaggcgattgcagttttcaatcatattgaaactagtgtagccacgatccattgttacaatatatggaccacaattcaaagctttaagcatttgaacagccgctttgcgttcatccatttctgatttaggctgaaaaatacaatcctggtaggtattattcaatagatcatataaggcattaacgtgaatttgacaatagggtttctttttatgagaagaagcttgtacaatgttattcgatttcggattccagatttgattaaagtcagagccatcaatggcaaacaaacggtagtgatgatcaaaaagttgaatattaaatagattttgattaaaaacagtcagaatatgtttaaaacaagcaggagaaagctggcttttgcgttgaacataggcagaagtactaactactttatcgttctttttagttgcatcttcgccaaaagctctaaagagttcactgtttaaattctgaccttgcatgttaattgtagttttaaggactgtcgctgcatctaaagtgcgtttcctggtaaaagcatgaggattattaataaaatcgtgaatatgatccccagtattattgataatttgatcaagacgttctagaatattcttatgaagggctttcataattaacaccatctttctggcaataattttgaaggtttaaaatatataatatataagataggcgaaaaggctggtcttttcgcctttattttatacaaaaaaagagatcgaatccaaatgattcgatctctaaaaaagcacccttaattgtcaatgtcttaacttaatgacattggattagctctggtcgcttatttaaattttagtatggcatttctttaaaaaattagaatatcgatctttttcaccgtttaccttccaatattaaccattcaccgaaatttttaaatttaaaatattttttcgtctatactgataagcaagaaaggagaaaaagggatgaaggtaaaatttaacattgataatcaattagcgggagaaagtgctgaattttggttaaaaaagatgactaataaattcagtcaattgggtaaagaattaagtggtgaacaagacacgatttggtgcagttatgatgatgaaattattcctgtgaagtttgaaaatatttatttaattcaagtcgaacaagagcaaactttaatttatgacaaaacacagagttacaggtataaagggcaattatatcaggttaaaaatattttgccacataattttttaatagcgtcaagaagtgcaattattaattatcaaaaaattgatcatttggaagttatggatggtggcaatattgatgtcattatgaagaaccaaatgcgggtacaaatttctagaagaaaaattaaagacttgaaagagaggttagggttatgaaaagaatggaatctttcttggtaagtggaataagtggcatgggaattggattaacttggtattcaatagtaactttatttcaaacgggaacgaattggaaaaatgctcaaattccgtttacaagtttgctcttttatttgattgtctcttttgtgatgggagcatttttcaatttgacaggattgatttttgaacaaacgcaatggtcactacgaaaacaaattattgtaaacttttttgttagctatgttgccttttttgcttttgaattagtgattaatgatttggctttatcggttcatttcttcttagtaattactggagtatttgtcttgatgtacttgctcgcttatggtttgtactttttacaattattgcgagatgttaaacaaatcaatcaaaaattgaaagaaaagtaaataatcaaaaacgatcaagcctaaaaatcttgatcgttttttcgttggttagataaaaattacgcgtggtgctagttaaatcgttttagttaataaaaaagtccaatcttgttagactcaacttgtataataatagaaaagagcctgatctgattgaactgccttaagcttaagcgttttagccaccatttacaagttagttttaaagatttagtgataatttgtcggcactggtatcgtttgtatgcaccggctgagtttactcatcggcgaaatattgatcaaattaaaactacggacagtctgattttggctttacttatctggcaagctaagacaggaattgaatcacaaagaagattctgtgaatgtttcaattgtttatcacactcacgttttaatcgacgttcacgtcagctattgcaattgatttatcagatacggcaagaaatgaataaaaaggttgacctgaatggacatttcttgatcattgacagctttccggtacctgtttgccaaccaattcgcaactatcgtgctaaaatttttcgcggttatgccaacattggttataaggccaccaagaaaatttacttctatggtttcaaagttcatgccattgttagcgatgacggttacattcttgattatgtcgtaacaaaagcatcagttcatgatgccaaggagacagttgaactgctggaaaatgcccatccatctaattactatcttcttggcgacgaaggctatttaggcaaagaactgcatcaacagctaaaacaaatgggttatgaactttggacaccatatcgtaaaaatatgacaggagctaaaaagcacaatgatcatcaattgatggctattcgcagaacaattgaaagcgacttttcgcttctgacctattacaatgccgagaacaatcgagcacgtagtctgataggctttcaaagccggttggaaattgcaattttagcttataatttggcttattgtctagaaagatttaactagcaccacgcgtaaaaattataaactgtcttgaatattatcagctaagtagtcataaagcataccatgctttaattgcttagtatcaactcccaaagcttcagcaattgcataggcaaaggcccaagcggtagcaggaccacggcttgttaaaattttatgctctttatcagtaacggtgattttctctgaaaaatgagcacttggggcatcttttaagcattcttcttcaatgcctggataacaagtgaagtccgcatctgccaaaacaccatagcgagcaagagcacgtggagcagcacacattgcggcatcccacttgccagcttcatgacgcttaatcatcagatcacgtaatttttcattatcgcgtaagttagcagaaccagtcatgcctcctggaaaagcaaccaaatcataatctaataaactgtcatctacaactttgtcacaagtgatttcaatatgatggtcaccatctacttttttacttattaaacctaccatatcgcattcaacgttaagtctacgcaatacgtcaacaacgcttaaaccttcgacttcttcgcaaccgtctgcaaatactacagcaacttttgtcataaaatcatcctttctataactattttaattatctacttacattagatctaagtaaaatgaaagatctgctaatttgcttaaatgaagagtaggatgaggtgaaattggtatcttgtcttttttaggtgccagccataatgattttagattggcattttctgcaccttgaatttcttcatccagattagttccaattactaaaactgtgtctggatcaatatctggattgtctttcagaatcttaaagaaaatatttttgcttggcagcttgtccgtaaaatcatcggcgaaataagcattgtcaaatgaagaaagcaattctgtaggtgcaaggcgcggttcgatttgagtgcgcttttctttagcaagcaaaatcaaatgcagcttgccactgacttcatcaataaagtcgatggcgcccttgactaacctggtttgatccttcattgcatcatcaaaaacagttcgcgttttagaaagatcttcttttaaaaatgtagataaagctaaatcgatttgatcattgctagataaatttttaaattctttttctaagctagtgtagcgtagtcgctcagctggtccccagtctaccccataatgttttaaagtttgccgcagcgcagttttttctgctaatttttcatttaataaactgccttcgggaataaaaattaaagtttcaaatgtagccatgaataaacttcctttgtgttagttcctattagaattataatgaactagacaattttaggaaaggaattaaaaaatgacaatctggaccgtaattttcttattattaggtggtgttgcaggtggcttattatcgtcagtggcctcaatggcatcacttgcatcatacccagttttgctagcagtaggaattccaccagtatttgctaatgtaactaatgatgcggcgctaatttggactagcatcggttcaactgtatcttctactaaggagttaaaaggacattggaagcaagttttgttctataccatttttacagttgtgggatcaattttgggttgtattttgcttctatcttttcctccaaagatttttgaaaaagcagtaccattctttattgctttctcaggattgatgattattgtttctggtaaacaccatagtttaaatactaagacacagcctacttggcttaaaataatttattttctcgcacttttagtcatggggatgtatacaggttactttggtgcagctggtggagtcatcgtactagtacttttaacttacattaccaatgataaatttattgttattaacgctatcaaaaatgtgatttgtggttttgctaatttagtagccttgattatatttatgtttacctctcatatttattggcttcaggcaattcctttggcaatcgggatgttcattggtggctatattgggccagctattttaagacgagtaccggaaaagccagttcgaattttcattgcaagcttggccttcattcaagccggttacttcttttatacggcatatctgcaataagtttggtacaatattaagcaatgaaaagggggctaaggttgatggcaacagaagtttatttggtacgtcatggtgaaacaatgtttaaccaattggacaaagttcagggttggtgcgattctcctctaaccgtgaaggggattaacgatctaaagagaaccgctaaggccttgagtcaagttcactttgataacatgtattcatcggatttgaagagagcaattgataccgttcacttgatgaaggatgctaatgtggtctcggatattggtaaaattaaaaagctgcctgaatttcgtgaggtcttctttggaacttttgaaggcgatgatattaaccagacttgggaacaagtagcactagccgcaggaattgaccatgaagatgatgtaactaagatcatcaatcaggtaggcttgcgcaaatttcgtgcagcaacaaaaaaggctgatccgcgtcatttagcggaaaatcaggatgagttagatgagcggatggtacgggcaattgacgttttgcgcgatttaactaaagatgaacaaagagttttgttagttagccatggtgactttattaaaactttgtccataaaatattggaataagagtaatggcaaaaacgatattgtttttccaaataatgggagcgttactcgtggaattttgcacgatgacggttcatttgaaattgttgattataatgtagatgctgaagagctataaaagtcctactgccgaagtagggccttttttggtacactgataacgaaaggaaaatattttatgaataaagatcatacaactaagcgttatgtcttcgtaactctactgaatgttgttattactattgctgaatttataggtggtattttttcaggttcattagcactgctttcagatgcatttcataatctgagtgatgttggtgcaattattttatcttttgtggcgcacctgattagtcgcaaaagtcgtaatcagtttaagacctttggttatgaaagagctgaaactttagccgcttttactaatggcgttatcttgatcgtgatcagtgtggttttgtttgttgaagcaattcaacgtttctggaagccggaacatattcacggtggcattatgctgattgtctcgattattgggctggctgccaatattatttcaatgctagcaatgcatagcgattccaaggctaatttgaatgtacggtcaacttttattcatatgttaagtgatgccttgtccagtgtagcggttgtaattggtgcgatcttcatttacttctggaatgtaacttggcttgacccagttttgactattttagtttcaatctttgttttgcatgaagcttatgaaaatacaatgaaagcagccaatgttttgatggaatctaatcctgatatcgacttgaatgaagtgaacaagattgttttatcgttccccatagttcaaaatatccatcatgtccatgtttggcgctacagcgatgactttattatgatggacgcgcatattaatgtagccccaggattaagagccgatgaattagagcagctataccaagatattggacaggagttacaaaaagagttaggtattaatcatattaccttacaagcagagtgcgagcgtggcagaaaagacaagatgatcgttccaggccacggtattaacgaagattaggtgaaagaatgtttaatgttaatatttttacagcgattattgtattgattatgggtatttatgacatgtcctatgcttttaataggcgtaagcaacctaccaataaaggcggcattagagcctttatggctttaggaattatcttcacgatcgcaggaattgttatgatcgttagagtattaatgaagtaaggaatcttagaatggctaaattagtattagttcgacatggcgaaagtgtggcaaatgctgccaatgtttatactggctggaacgatgttccgttgactaaaaaaggtgaagaacaagcagaaaaagctggtgaattgattaaaaccatttcggattttgctcccacccacattcatacttcagtcttatcccgtgcaattgtgacagcaaatatagtagccgatgtctgcaatttattatggctaccgatgactaagacctggcggctgaatgaacgccactacggcgctttaaggggccttaataaggacatttcacgtaaagtatttggtgtggaacaagttctattgtggcgacgtagttttgattcagttccacctaagcaggggtcgccaatgattgatcgccgttataagcattttgatcagcatttgatgccacgggcagaaagtttacatcaaactcagaaaagactcatgccatattattatgatcatatcgcatctcgattgatgaatggtgaagaccaactgatcgtagcccacggttcaagtttgcgtgctttgataaaaaagctagagcagattaatgatcatgacatcgtaaaactggaagttcctaatgcggaaccgattgtttatactatggatgatcacttaaagattattaacaaacaaattttacgtaaataatgttaaaaatgcaccttagtgcatttttttaatgctctaaatgaggttttacacatatctatggtaaaatctattatgatttctagtatatttagtttggagtattaggcatgcgtaaattatttttattacgaggtgcacctggctccggtaaatcttcttttattactcgccatcacttaaatccttatgcgatcagtcgtgatcaaattaggctactattggcggatttgacagtttactatcaagaggatgcggatgttttacaccaagtcattccgcggcacgtaactgtgcgtactgagcaaatggtggatcaccttgtagaacacaagatggaatatggggaaactgttattgtggatgggacgcatatcgttccaagtgcgattgaacattttaagccttgggtagacaagtatcactatgaatgctttgtagtagatctgatgcaacatactaccttagagagtttgcttaagcgtaatcagactagaatgcattacgattgggttaagcctgaagtggttaagcaaatgtatcgttcttatgaagcacatccagaagtaccatactgggcacataaagttgtgccaaatcagatggatcatgcgttgtcacagcgtgagacaaatttagatcgttatgctcatgtgattgcggttcctgacatggtagatgaagaagattttccacatgtgcatatctcgaacttttatttttcatttaatgacaagtttacagaaaagtatggaacttatcgaaatgtagtttcaattgctaaaactgaagatgaagcagttaagcagttcaagttgccatattttgtctttaagtttcatcacaagcactttttgatttcagcttatccaattcgaaatgagatgttggatccgatcagaaaggttaagggagtttggacatattcaactggtttgtataatgtagcggattttgtgaaagaatttccggaaaataaaaagcaacatgtgcatcagttcaacttaagtaagttagatccaacccgcttattacatatttggtaaaaaagacgtagttagaacattttatctaactacgtcttttgtgtaatttacttatattttgttttacttcaatttgccggccttagctaaaacttctttagccttttcaagtgaatggtgttcttcacgataacgcttgatgtcatagccatcaacatcggttaacttgctaagtctatcatcaaggtctttgaattctttttcaagatccttaatgacgccttcttcatcttcaacgtaaacatactcattttcatcagctttggcatcaatcttagcatcgtattcgccgacttttctagcatgtttcaaaatagatttaatatccttaatcgtttcatgttgtgcagtacggtgacgacgatcaggtactgaatcttcaattctagcgaagtggctttcagcatcactaattttctttgaaattctatctaatgcttttaattgtctttttgaatagtctgtcatgcttttttcatcctacgtaaactttaccatttgaatcctctctaccgaattcgccttcgttgtaggcctaatatttttgggatacaagaaaggacacttgaagttgtaaaaaaagtgtcagaaatttctttccgacacttaactatttgattatagctattaatacttaaatgctaaggcacccattggatcccatggcaataattgaattgggttatctttgccttcatcgtaagccttcttaagatcttctggtaagaatttcttgttgataactgcttggtaaacaaatgaattaaaccaagaatcactcattacgaagtaacccttaaagccaggtttttcaccccatgagttttcgatcttccatttagttggcttaccgtcaacgatatcaacaccggtaatcaccatggcatggtccatcatgctttcaccagaatcaagcatgtcggctttagacatagtgaagtcagcatcaaataattgatcacggcggtaaaggttagtatcaagaagtccagcacggcgttcagaatccttaactacgtttgaaccgaaccaaacaacttcgccactcttcaattgtttaatgattaagtccttcatttcatcaactttaaggtttaagtggcgaacttggcgaccgccttcaacgttacctaagtattcaactgagaataccttgtggaaaggtttgtcgttagttggagcattgatagttgagatatggtttgctaaatccatgccaacgtacttgtcaaagaattcctttggggtaatgtccctgtcaatatggtaattcttgtcatcatcgcggtattcgaagttgaacttctttggtggaacacccaatgaagtagccaaaatacggaagacatcgtttagcatttcttccttgcgagcttgtacttcatcttctgacttgccatcttgaactaatttacgtaactcaagaccatctttacgaagcaaagtatttaaagtgtcgtttaatgcacttgaattagtagcattagcagtttctggataaacactcttaggaacgataccatatttttcaataataccgcaaagcatgtcccattgaccgccgtcttgttgaggagtcgcaaataagaatgaaactttacgatcgcccaagtccttatcagcagttgcgatcacattttcaaagaaccagttagacttttcaaatttatcccagaagttagtgtaattttgagataattcgaagtcctttaacttaaatttcttttgtaatgggtgacgcatagtgtttaaagcactgaacatccagcagcgaccagactgcttttgatcggcagggttacctgtatcaatttcgattgagaaggttggatctaggtcgatcttagtttgtaagttttgactagctttgtagataccgttttcttgagcagcgtgactagccacatcaaaaacagggtggttagctaagtcttgttcaaatttattaatagtatcattgttgatttcttttaccataaaaaaaatcctcctttataagtacttaaattaattttatcttattcaaaatgagtcgtctaataatcttatcgattaaatggacgatgataccaaattttgtgaaattgaggatgctgggtgaagtagtcaatgatcataggatcaagcggccaaatgggtaagttagtttcttgagctaattgccaaactttttgcatttgtttttcaagcaaatccttactattaaattgtggattaataaaaaaatggttcattatccagacattactgtctttgcgagcgattttatctaaggtaacgctagataatagtatgtcttcttcattttttatagtgaaaatttggtgcgcatcttgcttattcataaaaaattcctttttaaaaaaataatctcatttttttgcgtaataaataatagagagctatttattttgtgttgactaaaaacattgtaaaatagataactgtcaaaataaaagataaatggagctttggaatgaaaacacgtggatttgaagtagtcaaaaagtatcaagatcaggaaattaatcttcctcgcagacagaccctagctagtgcaggctatgacatcgaagcggctgaagacattactatccctagcatttggcgactaaattttgtgcgaatttttaggttgattagaaatggacaccagctgtatgagcgcgactatgagatggcggatcagattttaaagccgttgttagtgccaactggacttaaagcttatatgccagaagatgaagtgttgattttagctaatcgttcatctaatacttttaagcgtaatctagctttgccaaatgggatcggcgttatcgatgcagattattacaataatcctaacaatgagggcgaaatttttgtacaaatgattaattatggcgtacggcccttgcacatcaagaagggagaccgtattgctcaaggcatttttatcaaatacttgaagaccgacgatgatgatccaattagtcgaaaaagagttagcggctttggatcaactaatgaaaagaagggtgattaatggctagagtaaaaacacaatataagtgtcgttcttgcggctatatttcggcaagctatttaggccgctgccctaactgtggtgcttggaatcaatttgaaaaagaaactgaagaagtgcaaaagcgttctactaaggcaactgctagtcgtttgattcagaagactggattaaatgaaccggtaaagctggataagattaaagctgaaaaagaagaacgaattgtcactaaatctgaggaattaaaccgcgttttaggtggtggtattgtgccaggctcactagttttaattggtggagatcccggaattggtaagtcaaccttgatgttacaaattatgagtgacttatctgaaaaatataaggtgctttacgtttcgggagaagaatcagctaaccaaatcaaattgcgggctgaccgactgggtgtaggtcaaagtaatatgctcttatatccagagactgacatgcatgatattcgcgaacaaatcaatgatgttaagcctgactttgttgtaatcgactccattcaaactatgaatgaaccaagtcttgattcgatgactggctctgcctcacaggttcgtgaagtaacaagtgaattaatgaaaattgccaagatggatgccattacagtttttgttatcggccacgttacaaaagagggtgcgattgctgggcctaagatcttggaacatatggtggataccgttctctattttgaaggggatgaacaccattcttaccgaattttgcattctgttaaaaaccgttttggagcagcaaacgaaattggaatgtttgaaatggttaatgaaggcttaagagaggtaactaatccatcatcaatttttctggaccaaagattacctaattctactggctctgctgtggtggtatcgcttgaaggaactaggccacttttagcagaaattcaggctttggttactccgacagcttttggctatgctaaaaggaccacgtcaggtattagttttaacaaagcttcattgctgctagcggtgcttgaaaagcggggaaacttaatgttgcagaatcaagatgtctatttgactgcaactggtgggattaaattgaatgaaccagcaattgatttagcaattgccatggcagttgcatccagttataccgataaagaaatttcgccgacagattgttttgtaggcgaagtgggcttaactggtgaagttcgccgagttgataaaatcgatgcacgagtaaaagaagcggctaaagtagggtttaagcggatctttattccacggcataatatgtattctggattaaaagatcatggcattgaggtaattcccgtttcgagtattccccaagctttaaaattagtttttggctagcattaattgaattcttactatataacgagtaaactaagattgtttgaatttactattttttgaaagaggcatgaattttggctaaagaaaaaatccgtgtaagatatgcaccaagtccaactggtcacttgcacattggtaacgcacgtactgcactttttaactatttattcgctcgtcataacaagggtacgatggtcttgagaattgaagacaccgaccaaaagcgtaatgttaagggcggttctaagtctcaaatggaaaaccttcactggttaggaattgactgggatgaaggtcctgataagggtggcgactatggtccttatcgtcaatcagaaagaaaagaaatttaccaaaagtatattgatcaattgatcgatgaaggtaaagcatattactcatacaagactgaggaagaacttgaagcacaacgtgaagaacaacgtgctgcaggtgttgcacctcactatacttacgaatatgagggtatgactgctgatgaaattaagcaagctcaagatgaagcaaaggctaagggcttaaagccagttgttcgtatccacattccagaaatggaaacttattcatgggatgatattgttaagggacaccttgagtttgaatcagacactattggtggggatttcgttattcaaaagcgtgacggaatgccaacttacaactttgccgtagttatcgatgaccacttgatgaagatcactcacgtacttcgtggtgatgatcacgtttctaacacacctaagcaattagttgtttatgaggcacttggttgggaacctcctaagtttggtcatatgacattgatcattaattcagaaactggtaaaaaactttctaagcgtgacgaatcagttcttcaatttattgaacaatatcgtgatcttggttacttaccagaagctatgtttaacttcattactcttcttggttggtcaccaaagggtgaaaacgaaatctttaacaagcgtgaattcatcaagcaatttgaccctgcacgtttgtctaagtcacctgctgcttttgaccaaaagaaacttgaatggattaacaaccaatacatcaagaaggctgatcgcgacactttgcttgatttagctttgaacaacttgcaagaagcaagtcttgttgatgagcatccaacaccagaaaagatggaatgggttcgtcaattggttaacatctactcagtacaaatgtcatacactaagcaaattgtagacatggctaagattttctttgaagaagctaaggatctttcagacgaagaaatcgaagaaatcaagaatgatgatggccgtggtgtaattgaagaattcaagaagcaattagacctcatcccaagatttacttcagttcaaatcatgaacgctattcaagcaactcgtaaggctactggcatcaagggaagaaagctctttatgccaattagaattgctaccacgcgttcaatggttggacctggtattggcgaagcaatggagcttttaggtaaagaacgtgtattagaacacattgatttaaccttgaagcaaatgagtgctaataatctttaattagataaattgaaaaagaggctgcaaataaatgcagcttcttttttcatctgctaaaataaaaattagttattttgacagaagggacaagtgttagccgtgagagtttataatacactgacgcgtaaaaaagaagaatttaagccattagttccaggacatatcagcatgtatgtctgtggaccaacggtgtataactatattcacattggtaatgccagaagcgcaattgcttttgacaccattagacgctattttgaatataagggttatgacgttaagtatgtttctaactttactgatgttgatgacaagatgatcaacgaagcgagagctgaaaaaacgactgtacccaaattggctgaaaattttatcaatgcttttttggctgatacgacagcgctaaacattgagccggcgactttgcatccccgtgcaactcatgaaattaatgacattatcacttttgttaaaagcctaattgacaatggctatgcttatgaagtagacggcgatgtttattatcgtgccaaaaagtttaagcattacggtcagttaagtgatcaaaatattgaacagcttgaagagggtgcttcagagcacattaacgatacagaacaaagccgcaaagaagatccaatcgattttgctttgtggaaggcgcaaaaggaacccgatgaaattgcttgggattcaccatggggcaagggacggccaggctggcatattgaatgttctgtcatgagtaccaaatatttaggcgatacgatcgatattcatggtggtggtcaagaccttgaatttccgcaccatgagaatgaaattgcacaaagtgaagctaagaccgggaaaaagtttgttaattattggctgcataacggttttgtaactgtcggtaaagatcaggaaaagatgtctaaatcactgcacaatttcgtaacagtgcacgatattttaagggaagttgatccgcaagtactgcgcttcttcatggctagcgtacaatatcgccgccaaattaactattctgctgaaaatttagcacaagcagctacaattttagatcgctttaaaaatactttgactaatattaattaccgtctagaagatgatacagctagtgaagaatcagccgaattagcacaggcgattatggcaactaacgaaaaatttgaacaggcgatggacgatgactttaatgtccaaaatgctttaacagctatctatgatttgttgcctgtagttaatgccaacgctaatgctgctagagctgacaagcaagaattgcaaaagtttaaagagaaattagctagttggttattagtgtttggcgtggatactaataagctttgcgttaaaaatgctggctccaatgacgatgaaattgacgctttagttaaaaagcgtgatgaggctcgagcaaataaagattgggcaactagtgatcaaattcgtgatcaattaaaggaaatggggatcactattcaagataccccacaaggaactaggtggactcgtgactaaaataaaaaaactaacggaagaggatgttaatccggatactttaaatggacaaactttagcctatttaggggatgcagtgtatgaattaattattcgcagacacctagttaaaggcggtatcgttaaaccacaagtattgcagcgtgaagcgactcactatgtttcagctaaagcacaagctgcgttggtaactaagatgcaagatgaagaaatgttaacggatgatgaattagctgcttttcgtcgtggacgtaatgctaaaagtcatactaaggctaagaatactagtttgaaaacataccaattatcaacaggctttgaagcaatgattggttatcttgatttactggggaaaaatgatcgagtggcagacttaagcaagtggtgtattgatactgtagaagaggacgggctgaaaaattatgacttcaaataaagattttgtctttggacgccatgctggacttgattatttaaaaacacaaagtgccgacaagattaataaggtttttttacaacacggtgtacaagaagaatttgctaatcaagtttatagtttagctaaaaaaaagcgtttagttgttcaagacgtgcctaaaaataagcttgatcgtttggttgctggtggcaatcatcaaggtctagttttagcaatttctagctttgaatatgcagatttaaatcaattgctggacaagtatgatgcggaaggtaaagaaccatttttattaatgttggattctattgaagaccctcacaatctgggatcaattttgcgttcagccgatgctactggcgttgacgggatcattattcctaagcgtcacgcgactggcttaacttcggtagtagctaaaacatctacaggagcaattgattatgtgccagtagcgcgcgttaataatttagttcaaactactaaagaactgaagaaacgcggttactgggtctttggaactgatatggcaggtactgattatcgtgaatggaatgcccaaggcaagactgtactcgtaattggtaacgaaggtaaaggcatcgccccattacttaaaaagcagatggatcaaactattactttgccaatggttggtcacgtacaatccttaaatgctagtgtggcaaccggggtattgctttatcaagcttataacagtagaaatccattagtaaaataaacagaaagtagacaaaagtgtgagttttgtctacttttttagatacataaagctcatttctgtccattaaacatgtgttttcttctcaaactcaggggatagtctgtattctttgaggtggaggataaattgaatgattaatgaagagaagctgattaagaaagtacgggcaggagatgaccaagctttagaaaaattgtttcatttatatgagccgttagtaaattcaatcgtgaagcaattctatttgcatcattatgatcgtaaagactgggatcaagaggcaatgattgtttgttatgaagcagcactagttttctcgcctaaaaaggggaaatttagcagtttatataaaactaaattgtttaatcatgcacggaccttggtacgttacaatatggcacgtcgcaggcaaatctatagtcaatcgattccgctagaaaaggcggacattcaaggaagcgtgaatgaaccatgccgctctgaattatcgattccagttgatgagacttacaataattttgttaatagcttgtcacacgttgaattaattgcattattaaccataattggcgagataagtacagagtatgcgattgatcatctaaatattgaagcaatgaagctggtcagagctcgagcacgaactttacagaaaatgcggaaagtgcttttttgatagctgatcaaaagaaagtgcggtataataagtaatgtagaatattttaggaggtaatttaagatggcagacgaaattattaagactgcattgttagaccgtcacatgaaggaagcttttgactggagtgattcagatatgccagttagagatgccctttgggactactttatggaaaagaatggtagagataccatgaagacggaagaagatatgcttccatttttgaaagactcagacgataaaatcgaagccttcgttaacgaaaatcttaagaagtaaatccgactaaaaaacaatgttctacgcaccgtggtcacgcatagttttgaccactaagacagctaccttctccggtggctgtttttttatactaaaattaagaaagaattttaaagatgaaatatataattggcatagacataggaactactgcgactaaaggtgtgttgtatggcgaagatggaagtgaagtagctaaattggcaatttcctatccattgattcaggaagaagcgggacaggctgaagaagatccacagcttatttttgacgcggtacagaaaatgatttatcaattaagtcagaaagcatctggtcaaattttggcaatttcttggtctagtcagatgcacagcttaattggcttaggtgaaaataatgagttactgacaaacagcattacttgggcagataatcgtagtagtgatgtagtgcagcgggcaaaaaagtcgggctgggcaagaatgatttatcagcaaacggggatgccgccacatccgatggcgccagtgtataaattgctgtggcttaaagaagaacagccaacactttttgcacaagtaaaaaaatggattagtatcaaagaatatattatttggggcttaactggaaaaatattaactgatacaactatggctgctggcagtggaatgatgaatttaaaaacgctgacctgggatgaaaagatattggctcagattgggctagatcaagttcaattgccgacaattgctgatcaacaatctactgtgggtaaaattattccagattatcgtgctaaattgggtttaaatgatgaaactcaaatcgttttgggcgcaagcgatgggtatttgtcaacgattggtgtcggcgttttggatgagaaagattttgcattgaatgttggcacttctggtgcggttagagtaattgcaccgaaggcaattgttgatcaaaagaatcgctttttctgttaccctgttgacgccaaacattatttgcttggcggccctgtaaataatggtggaattgtgttcgattgggccagaaaaacaatttttggcccagatgaaacggcagaggacgtcttaaatgtggcacaaactgctccggctggaagtaatggattgttgtttcatccttatcttggtggtgaacgagctccaatttggaatgctcaagcacgtggatcttttgttggcttgacgcgaaatcacactaaaccgcagatggctagaagtgttttggagggaattgtttttaacttgcttggcgcctctcaaggattgcttgatcaagtgggacagcctcaagctttacgtgttactggtggctttgtgcaaagtgattttgttagacaattaatcgcggacatttttaacttaccagtgattgtaattaaaaatgagcagtgtggtaccctagcagctatgtttttagctaaaactgcattagaagataagccagacctggaaaagattaaaaagcgtactgccgaaagccaagtttattttccaaatccccaaaatgtagcgatttatcaagaattgattctcgtttatcgaaaaattgagcatgaacttgaagcctcttatgaagatttggctcagtttcaagataagcatccacagaaatttgagtaaaacaaaaaagacgcattgcgtctttttttcatagattgattaactattaagcattttcaatatcttcaacaatctgatcaactgtcatacgattgtctttcaaaatttctttcaaaggtacttgatcagtatagacacgtttttggccgtagttgagtactttaatatccttgtcgccaaggtaggaagctactttttcaccaaaaccgccgtccaaaatattgtcttcaatagtaacaataactttgttttcttgagtcaatttgtctaaagcggcagtgtctaaaatattagcagaaactggatttactaagctagcacctgtcttttcagccacctttttacctagcatatcgtacatatcacctaacgctaaaacagcaacatctttacctggtttaatgtcgtacttgatttctgaatagtcaacagcagtaatttctttaccttcaggaacatctttggtaggcatcttaattgctacaggatgcttcttttgcttaatagcccattccatcattgccttttcttcggctaagttagttggagcaaggtagatccagttaggcaagttagaaatcattacttgatcaaacacacctaggtgagtcttacttgtgccagaaatgccaccaccagcaaccatcattacaactggtaaatcattagcggcaacatcgtgtgataattgatcaaatgcacgttgcaagaaggttgaattttcaaataaaactggagttgcaccttccttagccattccggcagcgaaggcaacggattcttgttcagcaattcctacatcatggtagttttcaggatatttgtttttaattctgtctaagccgaaaacgccgggaattgcggcattgatagccatgatcttctcaccattattgatgtgatcttcaagaacatcgagtgcaatagagctagcggtcggaccttcaggcattgctactgtcgtcttgtcagtctttaaatcgaatggcattacccagtggtgtgcttcttcgttgtcgattgcaggttgataacctttgcccttgagagtgttgatatgaagcaaaatagggtgatcaacatttttaactgctttaaaagcatcgatcattgattggatatcattaccatctgcgacataacggtaatcaaagcctattgcagtaaatggattttctttggtttcaccattagaatcacgtagtttctttaaagcagtaactaagccaccgacgttatcatcaattgacatttgattgtcgtttaccactacaactaagttatgcttttcaattgcagcgttgtttagcccttcataagcaaggccaccggtcattgaaccatcaccaattaaggccatgatgttttcatgtttgcccattaaatcgcgtgctttagccatcccagttgctaaggcaattgaggtagatgtgtgaccgacggcgtaatagtcatatgggctttcatcagggttgctatatggagttacatcttcatagtggtctggatcaagccaagcgagtgcacgtccagttaacattttgtgcgggtaagtttggtgggaaacatcccagacaatcttgtcctttggtgcatcaaaaacatagtgataagcaattgtagcttcaacgattcctaagtcgggacctaggtgaccaccttcagcggcatctttttctaagattagagtcctaatttcactggctaacttttccatttctggaagagataatttttttaaatcagcaggaccagaaattttattcaatagatattcaggatgtttatttattattatgtcctttctaacaagtagttacacttattatagataagcaaaaatcaaaataaaaatatttagttgtaattgagctcgattacttttagtaatgtaaatcagattattgacgtaggaagggacaacagtataaaatactgagtaagtatgtgtttttataaaagtttggaagtgagattatggcagtgaaaaaagcagccttagcctgcagtgtttgtgggtcacgcaactactcaatcaccgcaagtaagaatcgcactcagcgacttgaacttcaaaagttttgcaaacattgcggtaagaaaacattgcataaggaaacgaggtaaataaagctaatgattaagttttttaagagtgttggtcatgaaatgaaattggttaaatggccatccgcaaagcaaaatagacgtgatacagcaactgttattactagttcaattttatttgcggcatatttaggtgcacttgactggctcttcacttggttgactcaaagattaatgtaattgctagcataattagaaattatcagcgattcatgctataatattgacagctaaaagaaaacctctgtgggaggtttttttgtttacctaaaatttaaggagaaaaatatggtcgaaacaacacaaaagaaatggtacgttttgcatacttattcaggctatgaagacaaggttaagtcagacttgttgtcacgtgcacaaagcatggggatgcaagactacattttccgtgtaatggttccagaagaagaaaaagtagaaaccgttcgcggcaagaaacaagaaattgaagaaaagattttcccaggatatgttttagttgaaatggtaatgactgatgaaagttggttcatcgttagaaacacacctaatgtaactgggttcgttggctcacacggtggtggctctaagccatcaccacttcttgatgaagaagtaacgcgtttgcttaagaatcaaggtcaacctgctaagaaaccagtagttaactttgatattggcgaatcagtaactattactgaaggtgcatttaatggcatggtaggtaagattactgatattcaaccagataagtacaaattatacgtatcagttgacatgtttggtcgtgcgactactgctgaacttgattatgatcaagttaagaagcttgacgaaaacgaataatatttagaatttttagttgtaattgtacccaaacgatgttattctaatacggtacgtttattattgtgggaggagaaaaaaggaaaattctccattttaaccgcatcacggaatcaaggaggttttgaccgtggcaaagaaagttattaacgtagttaagttacaaatcccagctggcgctgctaccccagcacctccagttggtcctgcattgggtcaagctggtattaacattgttggttttactaaggacttcaatgctagaaccgctgaccaaaagggcatgattatccctgtagttattactgtatatgaagatcgttcattcgaattcattactaagactccaccagcaccagttcttttaaagcaagctgctaagatccaaaaggcttctggtgaacctaataccaagaaggttggtaaggtaaccaaggaccaagttaaggaaattgccgagactaagatgaaagaccttaacgctgctgatattgaagctgctatgcgcatggttgaaggtaccgctagaagtatgggtatcgaagtcgaagactaatcctgttatttaggtaacaaattaggtgggagagttaagagaagctcgtttgaccacatatacaaggaggaaatcacatgccaaagcatggtaagaaatatttagatgctgccaagaaggtagactcaaataaattatactcagtagcagaagctatgaaacttgttaaggaaacttcatacgcaaactttgatgctactgttgatgtagcttacaacttaagcgtagatcctaagcaagctgaccaacaaattcgtggttctatcgttttaccaaatggtaccggtaagacccaaaccgttgtagtatttgctgaaggcccacaagctgatcaagctaaggctgcaggtgctgactttgttggctcagatgacttggtagaaaagatccaaggcggctggttagactttgacgttgtagtagctactccaatgatgatggctaaggtaggtcgtttaggtcgtattcttggacctaagggcttaatgcctaaccctaagactggtactgttaccatggatatcgaaaaggctgttaagaatgttaaggctggtcaagttgaataccgtgttgaccgccaagcagctattcacactcctattggtaaggtatcattcactgaagaccaattagttgaaaactttgacgcattacgcgacgttatcttacgtgctcgtccagcttcagctaagggtcaatacattaagagtgttgctgtttcagcaacctttggcccagggatcaagcttgatccattaaacttggactaatttaaaatagactattaaaagcctcgctattgcgaggcttttttctattcattgacctattattttcgaacatggtatcataaattgaacttacaaatctatatattaaggataatgtcatgaaaaagcattctattggaaaactagtcattatgttggtgctaatgctagcttttgttacgggctgtgctaataatggttctaaaatcactattgttggttcaagtgcaatgcagcttttagcagaacaagcaggtaatgattatcgcttaagtcatcaagacagcaacattgtcgtgcagggtggaggatcaggtacaggattgagccaggttcaagctggtgcagtccagattggaacctctgatgtttttgccgaaacacaaaagggaattgatgccaagaaacttcgtgattataaaattgcagtagttggtattgttccaattgttaataagggtgtaggtgtgaaaaatgtttcgcaaaagcaattgaaacagatcttcactggtaaattaacgaattggaagcaactaggtggcaaaaatgaagccataactgtgatcaatcgttctaagggaagtggtactagatctgctttcgaagatataattttacaaggaacaaaaccagttaagtcgcaagaacaggactctaacggtgccgttaaaaagattgttaattcaacgcctggtacgattagttacttgtcctttccttatgctcatgataccaatattcaaaagttgagtattaatggggtaaagccaactaacaaaaatattactactaataagtggaatatttggtgttatgagcacatgtacactaagggtaagcccaacaaacaaactaaagcgtttattaattatatgttaggtgaaaaagtacaaaaagatcttgtacctaagattgggtacctcagtatcaatgaaatgaaagtaactcgtaatagcaagaatcaagttacacaaataggaaaatagttcatggataagaaggataaattaaaggaagttgttgatcaagcaattgctagtcaacacgttccacacgttaaattaaaaaagatgggtccgactagtgttgatattgataaattaaccaagccatctaaagagactcatcaagaatattggggcaagggtttaacttacttggcaattgttttgattattgtcttagttgtctcaattatcggctttgtcggctatcacggcttggctacttttgtcagcgatcatgttaatgtcattcactttttgacttcaactgattgggacccgggtgagggcaagaatcatgttggtgctgcggtaatgatcgttacttcgttcttagtaactcttttagcagcattggtagccaccccgtttgcaattgcaatagctctttatatgactgaatattcatctaaaaagggtgccaatttcttacagtcagtgactgaattattagttggaattccgtctgtagtttatggtttcttgggattaactatcatcgtgcctgtgattagaaaactatttggtggaacaggttttggtattttagcagctacgttggtgttgttcgttatggttttaccaacaatcacatcattaacggttgatagcttaaaggctgtaccaagtcattttagaaaagcttcaatggccttaggttctacgcattggcagactatttatcatgttgttttgcgagttgctacgcctagaattttgacggcggtaatcttcggaatggcaagggccttcggtgaagctttagccgtacaaatggttatcggtaatgccgtcttgatgccatacaatttggtcagtccatcagcaacattaactagccaattaactagtcaaatgggaaatacggtcatgggaactttgccaaacaatgcattatggtcattagcattattgcttttaattatgtctttggtatttaatttcctagttaagttaattggaaagaagggacaaaagtaatatggatgcaaaaaagaaagataaattagctacggcgattatctatattttggtaggaattgttgtattaattttggccggtatcctaggtgatatcttgattacaggtattccacatttgtcctggcgctttttgagttctgaagcctcatcataccaagctggtggtggggtacgtgatcaacttttcaattcaatttatttgttaattttgactactattatctccttaccaattgctttaggagcagcaatttatctagcagaatatgctaaagataattgggtgaccaatttgattagaactacaattcaaattcttagttcattaccatcaattgtagttggcttattgggttatttattgtttgtagttcaatttggctttggtttttcaattatttctggtgctttagctttgaccttttttaatttgccaattttaactagcaatattgaagaagcaatcaagggcgtcccacaagatcaacgtgaagcaggattggctttaggattatctaattggaaaactattcgcgggattgttttacccgctgctcttcccggaattttaactggaattattttgagtgcgggccgaatcttcggggaagctgccgctttgatctatacagcgggacaaagtggatcaacagtcaattatgcggactggaatccatttagtccaactagtccacttaatgtaatgcggccagccgaaacattggcggtccacatttggaaagtaaatactgaaggaattattcctgatgccacgattgtttcagcagctacttcagcgctcttggttattgtggtaatcgtatttaatttaggtgcacgttatttaggcaataaattgtaccgcaagttaactgcagctaagtaggtgaaataatgcaagatttaaaacctagctatattaaaacttttgcaaatgatgatttggaattatcaactgaagatttaagtgttctttatggcggtaaggtacaaaaattatttgatgccagtcttcaatttaaaaagaacacgattacagctttgatcggtgcttcgggttcaggtaaatcaacatttttacgttcattaaatcgaatgaatgatcgagtagcaactgttaacggaaaaatctggtttcatggtttagatgtgaataagcctaatatcaatgtttatgaattaagaaaaaacattggcatggtttttcagcggcctaatccatttcctaaatcaattagagaaaatattgtttatgctttgaaggcagatggacataaggatcgggcagaacttgatcgagttgtagaagaaagtttgcgtgcggctgctttatgggatgaagttaaagataagctggataaaagtgcattagcattgtcgggtggtcaacaacagcgtttatgcattgctcgtgctttagctgttaagccagaaattttactactggacgaacctgccagcgctttggatcctgtttctacttctaaactggaagatacccttaagcagttgaggagtaagtatactatgattatggtaactcacaacatgcagcaagcctcaagaattagtgattatactgcattcttccatttaggacatgcaattgaatataattcaacggcagagatctttactaatcctaagggtaagattactgaaaactatattcagggaagttttggataaaatgacaacaataatttcagcaaaagatgtacatctaagttatggcaattatgaagcactgcacgggatcagtcttgattttaagaaaaaagaattaacagctttgatcggtccaagtggttgtggtaaatctacttttttacgctgtcttaatcgaatgaacgatgacatcgaaaacattaatatcacaggtgaaatcaagtttgaaggccaagatatctataattctaaaatggatttggtcagtctacgtaaagaagtcggcatggtttttcaacagccaaccccattcccgttttccgtatatgacaatgtggcttatggcttaaaaattgctggtgttaaagacaaagagctaattgatcagcgggtagaagagagtcttaagcaagctgctatttggaaagaaacaaaggacaatttaactagaaacgctcaagcattttcaggaggacagcagcaaagaatttgtattgctcgtgcgttggctgttagacctaaagttgttttattagatgagcccacaagtgcgcttgacccaatttcaagtagtgagattgaagagacactgatggaactaaagcatcagtatacttttattatggtgactcacaatttgcagcaagcaggacgaatttctgatcagaccgcctttttgatgaatggcgatttgattgaagctggtccaactgaagaaatgtttattgcacctaagaaacaaatcacaagtgattatcttaacggtcgttttggttaaaattttgaggtaaaaagatgcacgaaatatttttggatgaactgaaaaaattaaatacacaatttatggaaatgggtgtcctcgtcaacgatgatattgaccatgctacccgtgcttttgttgatcatgataaaaagactgcgcagtcaatggttgatgatgaagaaaagattcctacagaatcaattaatattcaaaagcaagccttaaaattaatggccttgcagcaaccggtagctactgattttagagttgttatcagtattttaaaggccactactgacttggagcgaattggtgaaaatgctatgagtattgctctggaaacaatcagagtaaaaggtaatcctcgtattccagaagttgaagaaattatttctaatatgacacataatgtgcgacatatgttaattcaagttttaactgcttacgtgcaagatgatgaaaaaatggcacgtgaagtggctagtcgtgatagcatgattgaccacgactatgtaagagctcgtcaattgatcgttgatggaattgaagatgatccttcgcgtgcaatggcttcatcaagctattttgtagttacccgtttacttgaacgaatcggtgaccacattgttaacttggctagctgggtggtttataaaactacgggtgaactagaagaactatctaattcaactgaaagtgaaacgatttaaataaagtaccgtaaaaagcggtgctttttttgtaataaaaaacagttgatacgcgtggtgctagttaaatcgttctagacaatatgccatattataagctaaaatagctatttctagccgctgttgaaagcctactggacttcttgctcgattattctcagcgttgtaataactaagcaaagaaaagtcgctttcaatgctttttctaattgccatcatcgcttactattgcgtggaccttgaagccataataatagactttcttggttgctttataaccaatatcagctacgccccgaaagatcttgacacgataattgcaaacaggctggcaaactggcactgggaaactatcaataatcaaaaattctccagctgtctttacttcttgattccaagcctgacggatacaacgaattagaggcaagagcattcgagctcgacggttaaaacgagaatgagataagccaacgaagaatttacagaatcttcgttgagattcaattccaatttcagtttgccaaatgagcatcgctaagatagaactatcaggaagcttggtctgatcaacatttttacgatgtttaagtccatcaggcgcataaagcttatatagcgagcgacaaatcacatttaaccgattaaaactaacttgtaaatggtgagaaaaacgcttaagcttgagatagttcaattagatcagactcttttctatttaaattacctacaacttttattaactaaaacgatttaactagcaccacgcgtataattaatgaatatttcaaaaactgtattggcgttataccaaacaattattggtgaaaaacagaaacgcttaatcaagacagtagatgcttatttggacattaactacggtgataaagtttatcagataattgatcaagttaaggaacgtaatattccaattttgtcttttggggatatagcagatcaaaacaatacttactcaaactacactgtttttggcaatgatcaagttgacgagatggtggataaaattaatgaaatcatcaataaccaaaataaataaaattatcttttgcattttacagcaaagcttgctataataattaactgtaaattctacctaagactcgggtggcatgacgcctcaaaatcccgccgaggccagaagatgatgaagatttttatgctccatgtctttcggcatggagtttttgcttttttaaggccttatagaatttatcaatgtgatcatggaggtgaaataatttgagtaaagctgctattgctgaaaaagaaaagttcgttgatgcatttgctgaagaacttaaagctgctaaggcaatcttggtaattaactaccttggtttgactgttgaagaagttactaacatgcgtaaggaacttcgtgataacgatgttaagatgaaggttatcaagaacacctacttaagacgtgctgctgctaaggctggtatcgaaggtcttgatgatacttttgttggaccaactgctgttatctacactgataacgctgatgacgttactgaacctgcacgtatcgtttctaagtacgaagatgactttgacgttatcgaaattaagggtggtatgcttgaaggtaagttgacttctaaggatgaaatcaaggaacttgctgctatcccaggccgcgaaggtttgctttcaatgcttgtttctgtattacaagctcctgtacgcgactttgcatatgctgttaaggctgttgctgaatctaaggatgaagactcagctgaataataaagaaatttatatttaatatctaaattctaatttttcggaggatacttaaatggctttagatactgataagattattgaagaattgaagggtgctaccatccttgaattgaacgaccttgtaaaggctattgaagacgaatttgacgttactgctgctgctccagttgctgctgcaggtgctgcagacgcaggtgctgctaagtcagaattcgacgttgaattgactgaagcaggtcaagaaaaggttaaggttattaaggcagttcgtgacattactggtcttggccttaaggactcaaaggaccttgttgatggtgctcctaagaacgttaaggaaggcgtttcagaagacgaagctaacgacatcaaggctaagcttgaagaagttggtgctactgtaacccttaaatagttacagcccaactgggcaactatgaataagctctttgctatgtgcgaagagcttatttttttgtataattaaatttatgatgaaagatatagaaagaagactaacgccatatcaatgggtaatggccattttagctattatttcgatttttttgattattttagattttgctgcggttattaatattgatgaaccgactagtaaatggttctggatcaatagtgcaattgtagtatattttgcaattgattattttcgtggcttacatgcagcagaagacaagaaactatatttcaaaactcacatttatgacttgctgagtattattccaatggggttattgtttatcagcttaaatatttttaatttatctgggctggtatcagatttgcggcatttgcgtttgattcgattagctggtttgatgggaaaattacgtaatatttttcatactaatggcctactctatgtaatcttttttacaattacatttttgttggtaggagcggaagcattcgcaatcactgaacatgtaacgctggatactgctttttggtgggtcatttcaacagcttctactgtcggttatgatgcaatttttggcaaaacaattccaccgcatagtattgtaggaaaattcgttacattagtaatgatgcttttaggaattggaatagttggtatgttaacgtcatcgattacttcgtatttgatgaggagaacgaatggcgcgaatacgttaaaaacgcatgataatattcaattaattttgaaaaagcttgataatttagaaaagcaaaacaaggatttggctgatcaaaacaaaaagatgcaagcacagattaatgaattgaaagatgtacagaatacaacggagctgcataagataaaagaatggtttgagaaaaagaaaggttagttaaaatgagtgaagaaaaaaatcaaatgtattttgcgactgatcctactgccaagcatgatcaacatgttgttgattatcatgtggataatattgatttgaaattcacaacagacgcaggtgtcttttctaaaatgagggttgattatggctcaggcgtattgatcaaggcaatgaaagatgttgtttttcctaaggataatatcttggatgttggtaccggttatggtccgattggtttatttgcggctaagttttggcctgatcaaactgtagatatggttgatgtaaatgagcgtggattaagcttggcaaagcagaatgcacaagttaatcacatagataatgtaaatatctattcctctacgcgtggtgctagttaaatcgttctagacaataagccaaattataagctaaaattacaatttccaaccggctttgaaagcctatcagactacgtgctcgattgttctcggcattgtaataggtcagaagcgaaaagtcgctttcaattgttctgcgaatagccatcaattgatgatcattgtgctttttagctcctgtcatatttttacgatatggtgtccaaagttcataacccatttgttttagctgttgatgcagttctttgcctaaatagccttcgtcgccaagaagatagtaattagatggatgggcattttccagcagttcaactgtctccttggcatcatgaactgatgcttttgttacgacataatcaagaatgtaaccgtcatcgctaacaatggcatgaactttgaaaccatagaagtaaattttcttggtggccttataaccaatgttggcataaccgcgaaaaattttagcacgatagttgcgaattggttggcaaacaggtaccggaaagctgtcaatgatcaagaaatgtccattcaggtcaacctttttattcatttcttgccgtatctgataaatcaattgcaatagctgacgtgaacgccgattaaaacgtgagtgtgataaacaattgaaacattcacagaatcttctttgtgattcaattcctgtcttagcttgccagataagtaaagccaaaatcagactgtccgtagttttaatttgatcaatatttcgccgatgagtaaactcagccggtgcatacaaacgataccagtgccgacaaattatcactaaatctttaaaactaacttgtaaatggtggctaaaacgcttaagcttaaggcagttcaatcagatcaggctcttttctattattatacaagttgagtctaacaagattggacttttttattaactaaaacgatttaactagcaccacgcgtattcctctgattgttatgaacatgtggataatgataaaaagtttggtctaatattaacaaatccgcctattagagcaggaaaaaaagtggttaatgagattttactgggagcaaatgagcatttggttaatggcggtatcttattagtagttattcagaaaaagcagggagaacctagtgcgcgtaagctgatgaccaatacatatggtaattgtgaaattttaacaagagataaaggctattatatcttaaaatcaactaagaaataactaaataaaaaatgcttgaaagtactattaaataagcattagactttataaaagtgctttcaaaactggatttatcctcgtataataatcttgtaaatatcaagagtatgtgaagaggataattattatgaaaaaggcttggaaatacattgttgcagtattgattgtaattgttggtgtgtttatgttaggtatgatttccggtgataacgagactgctgctccagctggaattgctgcattatacttgatcttgtcaggaatctttttctaccacaactttagaaatcgtaacattgaaccattgtaaaaagtaagcagctagtcgcaaatagctgcttttttgatacaataaataaaaacgatgaattgagaagtgataaaatgctgtctggcgaagataaaaggaaatacatgcaattagccattgaccaggcaaaagaagctgaaaagcaaggagaggtgccgataggggcagttgttgttgatcctgatggccgcgtagttggtactggatataacaggcgtgaacttgatgaagatgctacccaacatgcagaaatgattgcgattaaagaagcttgcagtaagttaggcatgtggcgcttaattgactgcagcttattcgtgactttggaaccatgcccgatgtgtgcaggggcaattattaattctagaataaaagacgtttatttcggtgcacttgatccaaaagccggagcttgtggatcagttgtggatttatttagcgtagaaaaatttaatcatcatccgcatgcaattcgtggactgtatcgtgatcaatgtgcacaaatgctaaaagattttttcagagcgattcgtgagaaacaaaaagcagctaaattagctcaaaaagaagtataaaatcagtaatttttaaaacaagatgctggtaatatttactgaaatacgttaacatagttgttgggcaatgtttgacctctgaattgtgtcaggaccggaaggtagcagcactaaggttgttcaggcatgtgccttttttgttagaatattaacagctcttagctcttcgagagctaggagcttttttacttaggaaagagaatttatggcttatcaagcgctatatcgtaagtggcggccgcggacttttgacagtgtgattggtcaagaagcgattaccgataccttaaaaaatgcgattaaacgtggtaaggtttcccatgcgtttcttttcgcaggaccccgcggaactggtaaaacatcttgtgctaagatttttgctaaggcattgaattgtactaatttgcaagatggcgaaccatgcaatgagtgtgctaactgtattgcagctgatcaaggttcaatgccagatatcatggaaattgatgccgcttcaaataatggggttgatgaaattcgtgaaattcgcgataaggtaaaatatgctccaacggaaggtaaatacaaggtatatatcatcgacgaagttcatatgttgtcgatgggagcttttaatgctttgctgaagacattagaagagccaccagagcatgtagtatttattttagcaacgactgaattgcaaaaagtgcctgcgacaattatttctagaacgcagcgctataattttaagcgaatttccaaagaagaccttgagaagagaatgaaatacattcttgatcaagaaaatattaaatatgaagataaagctttagcagtcattgctcaagtagccgatggtgggatgcgggatgctcttagcattttggatcaactgttgagttacgagaaggaaagcgtcaactatgatgatgctttgcagattacaggctttgcagatcgagaaaatattgaaaaaattcttttagctttgttaaatcaggatgcaggtcaagccttgcagtttacacaagatgagttggctaaaggagctagttcaaaaaacattttagatgaaatcatcgatctaactactaagagtttattaatcgtcaaaaccgatgaaaataaacaggaaacttttttaacaaaagactttattgaaaaaataaagagcgtttctacagatagttattatcgattgattaatttggctaataatgccttgaatgatttacgctatactaatcagcaacagataccactggaagtgttcttagtagaagcaagtagtactgcaccagtgcagacaagcgctgccccagctaagacaacaccagctcaacctgcacaaggtaatactgatttgcaggctgaactagcagcgctgaagaagcaagtcgttgatttaacacaaaaacttagtgaagtatccaataagccaagtttatcaacaaatcaggtatttcacttggatactgcggtacctaaagtggctcctaagcctgctgttaaaccaaaagagaagcaaactaaaaagccggttagaaaagtcaaaaaaactacggcagaaaatcgcaaacaagtatatcatgttcttgaaaatgctactcgaaacgatttagagacaattaagaatgtctggcctgatttacaatctgttttagctgtctctgaaaaagcactgcttgatgtattagaaccagtggctgctagtcctaaacaagttgtcatgaaatgcaaatatactttatggtttgaaaatgcgagcgcagataatgatctgttagggcgcttaacagactatattgaaaagtttgctaaacattcttacggcattgttttggtgccagataacgattggctggcagttagaaaagaatttgttgaaagccataaggatgagctacttgctaagaaaaagcaacagattgagattcaagaaaaaaagtcagatgaaccagaagttgatccagaagtgattaataaggcaaaggatctttttggggatgcagtcaatattaaagactaaagtactatgagcaatgattataatattaaagttttaaataaagaaacaacattacagatcttactagaagatcataattctttgattcgttttggagatggagaattagatttaattagaggagcaagtattccgtatcaagattatcaaccggaattagctggttcgctaaaagagctcctgttagaaggcagcaatcgccgtttattagtaggattatctgatgtttttgaaaagttagatcgctataatgattattgccgtaatttttatcaaaatagtttcttcccgaataatcatgacttgttaagagaagttgaattgcaatacaatgtatacgtttctactttcttttcacggccatatattgatttagtagataaaagtcacgctaaagattattttgctaaaatgaaacagctttggcaggatcatgatcttttaattgtagaaggtaaatatagtcgctcaggcgaaggcatgacttgttttctaatgctagatcaattagtagactcatttgtccgccaactaatgcatatagtcgcaaaaaagttattgaagatgaaattattaaaaatgcagctaataggttgattttactgatgttaggtcctactgcaaaagtgattgtggctgatttgatagctcagcttaataatcaaatgattgatatagggcacatcgattcagaatatgaatggatgaaaatgggcgtaactaataaggtgaagataccgcataagcatactgctgagtttaattttgatgataaacaagttaaactagagaaagacgacaattttgataagcagattattagtataatagaataataaaggagaaaaattatgagtagaagacctaattttggtggtatgggcatgggcggcatgaacatgcaacaaatgatgaagcaagctaagaagttgcaagcacaaatggcagaagagcaggaaaacattactgctcaagaatttactggtaagtctgccgatgatttagtagtagctacctttactggtgaccgcaagttgaaggacatcaagattgataaggaagcaattgatccagacgacccagatatgttacaagatttggtaattgatgcggttaacaagggcttgaccaaaattgatgaggcaactcaggcaagcttaggtaaatacacgaaaggtttgatgtaattgcaatatccattaccaattgctcatttaattgatgcttatatgaagctacctggaatcggtgaaaaaacggcgactcggttggctttttatacgatggatatgcctgatcaggatgtcgatgattttgctaagtctttagttcaagtaaaaaaagacattcatcaatgtccgatctgtggcaatattaccgaaaaagatgtctgtgatatttgctctaatcctaatcgcgatcaaacaactattatggtagttgaacaaccaaaggatttgatggcttttgaggaaatgggcgaatatgacggactttatcacgtgcttcatggtgttctttcaccaatggatggaattggaccagaagagatcaatatcaagtctttaattacgcgtttgcaaaaaaatgatgctgttaaagaagtgattttggcgcttaattcaactccagaaggcgaatcaactgcgatgtatatcagcaaattaattaagccagctggtattaaggtaaccagattggccgctggtttgtcagttggtagtgacattgaatatgctaattccattactttaaagcgcgcagtgcaaggaagaacggcattataatggctaataaaaagcaagcaaagatcaaagcaatgggtgatcaaaagttggtagccgagattgaaaagctacaaaatcaaattgcattagagcaagatctcgatcaaacaactttagatttatccgaagataattatgtgcaaaatcgaatcttaaaggcaaagtatacttttttgtataatgaagctcgtcatcgaggcacaagatttagtggtattactaatgctattacccagtagaaaaagaccgaatattggtctttttttattttgaataaataaaaaatagtaggactgttaatctctatgaaacttctgtagaatagacatatggaggattttatgagaggttattttgttagttttgaaggccctgatggcgccgggaaaagtacagttttaaaagaagtattgaaccaaattggttcagagcttaagacacaatatcttgtgacgcgtgaaccaggcggttcaaaaattgcagaaaaaattcgcgacattattttagatcctgctaacgacaagatggacaataagaccgaagcgcttttatatgctgcatcacgtagtcagcatgtggaggagattattcgtccagctttaaaggaaggcaaagtcgtattttcagatcgctatgtcgatagttctttagcttatcaaggagcgggacgtgatttaggaattcaggaagttaagcaaattaatgattttgcaacggataaattagatcctgatcttacttttttcttagatcttgatcctgaagtagggttaaaacgaattgaaaagctgcgtccgggtcaggaagatcgtttggaacaagagaatcttgcctttcataaaaaggtttatgccggttttctcaaggtaaaagagacgtatcctgaacgcttcgtaactgttgatgctacgcagccaattgatcaggtagttgctcaagttattgcaacattaaagcaaagaatgccagagttattttaaggattgatttagatgaagttagtaattgcaattgtgcaaaaagaagactctaatgatttacaacgggcctttgttcaaaatgattttcgtgctactaagttagcaacttcaggtggttttttaagtcaaggaaatactacctttttagtaggttgtgatgacgataaagtagacgatgtattaaagattattaaggaacagtcccgagcaagagaggaaattgcaacaccacatatggtttcaactgggtatgaaattacacagcctttgaaagtgacagtcggtggtgcaacttgttttgttgttccagttgatgagtttaaacgcttctgatgattgatcttagtaatgttgggaaaaagcaaacccaatttttaaaaagagcatatgaccaaaaaaagttagctcatagttatctttttgttgatagcgatgaggcacgggcattgaatactgcatactggctagcttgtttgtttaattgtactggtgaaaataagccggatggcagctgtcaaaattgtcggcaaattttgtcaggtaaccacccagatgtattgctagtagcgcctgatggaaaacaggctctagggattgatcaaattcgtcccttaaaagaagaattagccaaaagcccagttgaaagtactcgccgtttcttctttattaatgaagcacaaaagttaactttagctgcagcaaacggtttattaaacttactagaagaaccagtagcgccagtagttacgattttgattactaacaatagtgatcagattttaccaacggtgcgttcacggacccagatcattaattttgacaatggtgagagggctagtggtaggactgcagtcttactggagaatggtttttcaaaagcagagattgaggaactgggtaatcttgataaatggaatcaggcaattaaatatttttatcaagaaatgctggaacacaacagcttagcacttgtcagtgcacataagctagctgctgatgctaagctagtgtcagagcagggttacatcttgcttcagttaaaattattggccgagcaagatttgcgtaatcctgctaaaagaataatggcggcgacaatgcttaagaatttaattgaaatagacaaaatgcgtttgagtaacgtaaatttacaaaatgcgttagattatctcgccttaaaatggaagtaggtgtttagattggatccatattcaaaactgaaaaagattgaagaaacaacagaaaatatgaccaagacgattgccagcttggaaaatgatattttagaaacattaaaagaaaacacggagttgaaggtagaaaatcaattactccatgagaagctggacaagttaacggcaaatcagcctgcacctgagactaaaacgcagagtggcttggaatcattgaagaagatttatgattcagggtaccacatttgcaatatgtactatggctcgcatcgtgatccaagtgcagattgtatgttttgtcttgatattttggacaattttggcgaaaaaaagggcaagaaaaaggacggtagataatgaaacgtcaaagcagttatgcaaaagatgaaggaaagctttatttagtgccaactccgattggtaacttggaagatattactattcgcgctaaaaaagttttaaccgatgcagattatgtagccgcagaagatacaagaactagtgggattttactggaaaaaattggggttcataataaaatgatctcttttcataagtataattccaaggagcgggcgccggaattgatcaagttgatgaaggaaggtgctgtgattgccgagattagtgacgcggggatgcccgtgatttctgacccaggttatgtattagtacaagaatgcattaagcatgatattccggttgtaccacttcctggtccaaatgctttttcaactgctttgattgcttccggttttaatcagccatttacttattatggctttttaccaagaaaatcatcggaacagaagacctattttgcacagatgcgcgataatagagcaacatcaattttttatgaagccccgcatcgtctagcaaaaaacctcaaaacattggctagtgtgctgccaaaagatcgtcaaattgtagctgcacgtgaactgaccaaaatccacgaagagtttatccggggtagtgtggaagaagttacgaattacttcaatgagaatgctccacgcggggaatttgtgattctagtttcacctaatacagaagcgcctcagcaactatcttggacagaattaattgacttagttaatgacttggttgaaaaaggtgaatccaagaaagatgcaattaaacaggtagccaagcagcatcatgtttctaagaatgaattgtatgatcaatatcaccaggattaattatgaagtataccgaagaatatcaaattgaatttaaagattgtgacgaaaatcggcgtttaaaattaccagcactagttgagttaatgatgcaggtttctgagcatcaattaagtcaaggtggtgctgggactgatgacttggttaagcgtggtctaggctgggtcgttactcaatatcattttgagattaaagacctgcctaaaccgggtgatcaagttattctaagtactgaagctagcggctataatcgtttttttgagtatcgtgattttggcgttagtacgcaagacggtaagccattagtgactgtaaaaagccagtgggtaatgctcgacttgaagaagcggcatatggtgccaaccgatactaaaatgatggaagattggggtgcaccactacttaaaaagatgccacgttttccaagattgcgtccgcaaaccgaatacgagcaaaagcgttcataccgtgcgcgttacgatgacttagatactaatcatcatgtaactaatagtcattatttcagttggtttgttgatatgttggatcgtaactttttaaaagaacatattgttacagcaattgatattaaatttgataaagaagttcattatggtgagagtataaattcttgcatggacttggttcaatatgatattattattacatctcatgcaattgaagcagaagatgggacagttaaggccgtctgtgaattaagttggcgtgagatatagtaacaacatgacgctattagttgtttttatttaggggaggaatcggtcaaatgaatacaaagaaaattttacgaacggatttacagcaactagtctttttaggtattgttgttgcaatgaaaattattctaagtcagttttcttttggtccagtaatggttaaagtgggactgggtttcattgggagtgtgctattaggatatctctttggtccgctctggggaacaattggcggtggaattagtgatttaatttcatctgcactttttggcgatcaaggtggctttttcattggttttactttaacagcaatggcaggcccatttatctacgccctgtttttatataataagccagttaaaatttggcggattattgcttctactattctggtgactgtaattgtcaatattggcatgaataccttatggctacatattatgtatggtatcaatttcaatgcggctttgatccaacgtttacctaaggagatgatcgttccttggattcaaatggttatcagctactttgttttacaagccgtttctcgtgttaaaataaaaaagtgatttaaagcgaaaagagaaaaatacgcgtggtgctagttaaatcgttctagacaataagccaaattataagctaaaattgcaatttccaaccggctttgaaagcctatcagactacgtgctcgattgttctcggcattgtaataggtcagaagcgaaaagtcgctttcaattgttctgcgaatagccatcaattgatgatcattgtgctttttagctcctgtcatatttttacgatatggtgtccaaagttcataacccatttgttttagctgttgatgcagttctttgcctaaatagccttcgtcgccaagaagatagtaattagatggatgggtattttccagcagttcaactgtctccctggcatcatgaactgatgcttttgttacgacataatcaagaatgtaaccgtcatcgctaacaatgacatgaactttgaaaccatagaagtaaattttcttggtggccttataaccaatgttggcataaccgcgaaaaattttagcacgatagttgcgaattggttggcaaacaggtaccggaaagctgtcaatgatcaagaactgtccattcaggtcaacctttttattcatttcttgccgtatctgataaatcaattgcaatagctgacgtgaacgtcgattaaaacgtgagtgtgataaacaattgaaacattcacagaatcttctttgtgattcaattcctgtcttagcttgccagataagtaaagccaaaatcagactgtccgtagttttaatttgatcaatatttcgccgatgagtaaactcagccggtgcatacaaacgataccagtgccgacaaattatcactaaatctttaaaactaacttgtaaatggtggctaaaacgcttaagcttaaggcagttcaatcagatcagactcttttctttttgatactacaacttgagtctagtccgattggacttttttattaactaaaacgatttaactagcaccacgcgtagaaaaatgtataaaatgaaaattttaagtgtttcgacagctactaatcatttgagcgtggccttgaatgatggtcaacaaattattgttgagaaaaatgaacgagatgagcgtaatcatagcgaacatcttgatccttggattgatgaaatcttaaaagataatgatttaagcttaaaagatattgatcgttttgcagttgctattgggccaggttcttatactggactaagaattggaatcactactgttaagatgtttgccagcattttagataaagaggttgtaggaatctcaactttacaagctttggctaaaggcgttcaagaagacgctttggtaattactggtttagatgcaagaaatgacaattattttgcggccggttatttaagcggtgctgtaccagagaatgtcattccagacggtcattacaatatcgacgttttaattaaggcgattcaagattatgcggccaagcatgaagttaagaaaattgtttttgtgggctcaggtcttgaaaagcaagatgaaaaatttaaagctttgaatattccatatgtttatggaactgaagaagagaatgtcatccatgctgggctaattggacaattagctgaaaatgcggttccagttgatccagataaattattgccacgttacttgcgtcgaactcaggctgaagtagactggcataaaaagacaggcaaaccattcgagccagatagtcattatgttgaagaagtttaatcaatttttccatcaacagttaaatcggattgatatgagttttaccccgtttattgcgaatgtaaacggtaagagactacaaattatgcaagctacagatgacaatattcctgacctgcttgtattagaggagcaagtttattcaggtcggacaccgtggaataagttttcatttgagcgagaactagagaagcggcataattgtctttatttggtagtgtattatgaatcgatgctagttgcatttattggtgcgcgttttactccagaagagacgcatattactaatattgcagtagcgccggcttttcaaaatatgcatattggtcgttacttaatgcaattgattattgatcgggcgcgtgaaaatgacagtgattgcgttagtctagaggtaagagtagataatgagattgcccaaaagctatatcgttccttaggttttgaaggtaccttcattcgtaaaaactattaccatgatactcataccgatgctatgaacatggttttatggttaaaaccacatcagattaaaagaaagaagtttacgttttgagtgaaaaaaatgttcgcattttagcttatgagagttcttgtgatgaaacttccactgctgtcattaaaaatgggcgtgagattgaaagcttaatcgtagcaacgcagattaagagtcatcaacgctttggtggtgtagtccctgaagttgctagtcgtcatcatattgaagtggttagtcagattactaaagaagctttggctgaagctaattgtacttggaaagatatcgatgcaattgctgtgacttatggccctggcttagttggtgctcttttaattggtgtaagtgcagctaaggctgcttcaatggcaacgggtattcctttgattggtgttgatcatattatggggcacattatggcagctcaactaaaagatgagattgaatatccagctcttgcattacaggtttcaggtggacatactgaaatagttttacttaaggatcctgttcattttgaaattatcggtgatacgcgcgatgatgctactggcgaagcatacgataagattggtcgtgttcttggggtaaactatccagcaggtaaaactatcgatgcctgggctcatgaaggcaaggatacctttaacttcccacgagcaatgatggaagatgatgactatgacttctcattctcaggtttaaagtcagcttttattaacacttgtcatcatgctgatcagattcatgaaaagttgaataagtatgatctggctgcaagttttcaagcagcagtaattgatgttttggctcataaaacaattcgcgcaattaagcaatataagcccaagacctttatcatgggtggtggggtagctgccaaccatggcttacgtgatcgcatgagtgcagaaattgctaagttgcctaaagcagaccaacctaaggtgattttgccagatattaagttgtgtggtgataatgctgcaatgattggggctgctgcgtataatctttataataatggtcaatttgcggatttgactttgaatgctgatccatcacttgaattgccatatgctaagagcatgttgaattaaatagaataactttttaaatcaaatacctagaacgattatttctaggtatttttttctactaaggcatggtccttaggatcttttaaatctaaggcgattgattcgtaagcgtcaaataaaatagtgtacttaaaaaccgtcccagttactgttatactgagacggttatttaagttcttttatttacaatttatctggatcttctcttgccacggtaaataagcttcaagggtttccgaatccagaatctcttcattcggtaatttctgaagcaaataattcaagtacttttcaggatcaaggccatttctcttggcagtttcaattaagcttagaataaagccacttgcagtagcaccctcaaaactttgagaaaataaccaattcttccggcccatgacgagtgattttacagcgcgttcagccttattgttagataattctaaattgccatcaagcaagacatgctcaaaagtagcttgatgcttgagggtataattaatggctcttcccaatttagagcctggcaaaacggtgattttatttttctcacaccagttgaagaactcttgcatcagaggcttgagctttgcttgtcttagctggtaacgttcttgtttgctcaaattctcccaggtttgttctaagtaaaacatgcgattgcagtagttgagtcctttttgggcaagggacttttcagaagcctgttgtggtacggcttcgtgaaactttcttctaacatgagcccagcagccaactaaagttgctttcggcaattgctcataagcctgccacatatcacagtgcaaataaccgggatagtttcctaaaaagtttaaggcaaccttgcaactccgggaaggatcatgatgatagagtgtaatcccgtattgatcatgtttgcctgaaaggaagacccaatagtaagtcttgattgttttactttctaagactgtataataagtttcatcggcatgtaaaattggccgcattaacagcttttgcttaagcagatcatacactggtttaaagtagtattgactgcttttcaaatcccaataatttaacatctgtcttgaaacttctagtcccatcttcttccagtcgctttcttgacgatagtccggcaccttcatttcatatttttgataaagtgaatgagcgatgagtgaagctgaacctagaccatggtttaggggagctttaggtactgcagctttaatgatcttgtcgctaagatttctttgactgcaatatttacatttgtaagcatgttggatatggtctaaccttttaagttgagctgggataaacaataattcttggcgaactgactgcttgcctatctcaatcagttcatgatgacaatcaggacaatgcttgtcgcctaattcatggtgaacctcttcagctggaagggcagctagtaagtcagcacgctttcgtttgtgagcttgtcttttataagtaatagtctgaacggcggcgtcggggacgttctccgtcatcttgagcatcaggttcatcaaagagacttgtttgtccatttaaaggcatttgttctgaagatttgccataacgtttttgcgttaagtaagctacttgttcacggaggagcttaatttcatcagttaagttttgaatagtagttgcttgttgtgcaataatcttttccaaattttcttgtgacatgagttaaacttcctcctaaatttattagttaaaagaatatcaaaaaagcgtgcgatgtcaagtgttagtagaattcgcacgctttcgtgttctttatttttggattgattgcgaagcccttcattagccagtcgacctgctcagaagataaagcttgaacttcattttgattcctgggccagttcaattttccattttcaaatcttttgtagagcagccaaaaaccttgtccgtcccaataaagggctttgaagcggtccttgcttccgccgcaaaagaggaagactttgccgctaaaaggatcaagttcaaactgttctttgactaaagttgctagtccatcaatgcctttacgcagatccgtcttgccgcaaacgatatagacttgccctaagtcactgagcttaatcatggcaagactttctcaagcagcttattcataatttcagggtctaagctgctgtaaaaattcagctctaagtcattcttctttaaactaagcaacagattattgcgtggtggacgagccttcttaggtttagaagaacggccaagtgccacaatgggttgttgtttttcgatcatattcttaacctccattaaattgatgagattagaatacctgaaaaatacggactaaaaaagatactcggttatatgacgcttacattgattccttgcctgcgttacaaattctaaagtattcgctagaaccatctgcgatatatggccccatgtgacgcgtgtcatcgcctgtttttctttcgatatgaattacccgggcaccactatctgcgagcattctggtacaagtagggcctgagaggacgtgggtaaagtcaataacgagcatcccgcttaaaggataaggtttgtttttatctaaatgactgttttttgcttctagctcagcataattaggttctgtcatagttgtgcgctttctattttaaaaagaaagtgtctgggaaaaaactaagtctcagatcatgaaaaaagaacgttgaatttttgtttcaacgctctttttgtatacttttagctccagccttgatattattaaatcatcacaaaataaaaaaggtggaaactaacatgtacaagaattatatcacaggtcaaactgctttaacacttaatctagattttgccattccggccaatcatttggctaatgtcatcagctggtttgtagattcaattccagaagatgttttagtaggcaagactgctaaaacgggccgcccagcctatcatccagccatgatgctcaaaatactgctttttgcttactccagaagagttttttctggcagaaagattgagttgatgctggaagaaaatctgccaatgatgatcttggctgaccagcaaaagatttcatatcatactatcaataattttagatcaagcagccatgccaatgaactgattaaaaagagctttatctacttcactaacctgttagaagatgaaggcttaatcaatgaaggtgctgcttttatcgatggtactaagattgaagctgatgctaaccgctatacatttgtctggcgcaaagcggttgaaaagtatcatgaaaagctgaaaggccaggcagttgaactttatgatgaattgattactaaagaagtagtcaaagaaatggaaaaagaaaaagttcaaactagtcaggggctaaaggaattagctcaagaaactgaagcagaaattaacaagctgactaaagagattgagcaggaaaacaaagccattcctggcggttcacctcgaaaagccaagcgacgtggactaaaaaagattctgcaccggctaagaaaagattatgtgccaagaatgcaaaaatatgaagaagccgaagagatctttgccggacgcaacagttattccaaaacagatcatgacgccacctttatgcatatgaaggaagaccacatgaaaaatggtcaattaaagcctggctacaatattcaagcagtcacgaccgatcaatatgtagttgattatgccatctttcctaatccgacagatttcaaaactttggagccggttttggatcaaatgaccgtgttggacaagtttgacaaaatcgtcgccgatgctggctatggcagtgaatacaattattcgatgctggaggaaaaatatccagacaagaagtactttattccctacactatgtatgaaaaagaacagaccagaaagtataagaatgatccaactaagctaatcaactggtactacaatgaaaaagatgattattacattgatcatcatggcgtcagattcaatttcaaatattacagccagcgtaaggatcgttctactggtcaggtccgtgattttaaggtttatgaggcagacgagttccagctaacgccagaattggaacaattggctaaaacagctagcggccgccagcgccaagttcgctataatcctaactggcaatatttaaaagaaaaagcaaaagaagttctccaaagcgaagaaggcagacacatctatggcatgagaaaatatgatgtagagccagttttcggacatttgaagaacgtatttggcatgcgcagaacgcacctgcgaggtaaagagaaggtcgaaaccgatatcggaattgcctttatgatgatgaatttgaacaaatattgtcaaagaaggtggctgaagggccgatttttattgttaaaaattttaaagagaacaaaaaaacgatcaagattcttaaaaaaggaaatcttgatcgtttttattcatctggaagctatttttttcccagacactttgatgagaataaattaattattcacccttgataacttcagtacgtggattcttaggaccttgagccttagaaattacgccttcttcagtcaatttttcgatttgatctggatcataaccaagtgaagctaaaatttccttgttgttttcaccaagatctggagcacgcttgtagttagaaagtgagaatggcaaaccaatagtcttgaacttaccacggttaccaccttggtcgatggttacgatagtaccatccttgttcaagtccgggccattttcaatttcgtgccagtcaagaactggacctacaggaataccagcagcaccaagcttcttagttaattcatacttgtcgtattgcttagtgtagctttcaattaatgggtaaatttcttccttgtgtaattgacggttgtgccagccatcaaagcgaggattagtttcccaacctttagccttgtaagtccgaccgataacttggccaccttcagtgttctcagcacgaggaattgccttgccccatttccagttagggtaaacagcgtagtgaggaagggcacctaagttgtctaacatgatttggttacgcaacttgatacggcagaggttcaatacagcgtcttgcattgactggtaaacaaaaataccttcactggtgtgttcacgttgaagaagggcagctaagataccaatagtaaggtgcatccctgggtttgagtcacctaaagtagcagctgattgagtaggaacgttggctttgccttcgttccaaccagtagcagaagcagcaccaccagcagattgagcaactggttcaaaggccttaacgttttcaaaacgtgaatcttcattgaagcccttcaatgatgcatagatcaatcttgggttcaaagcgtgaagcttttcccaaccaaaaccgttacgatcagctgaacctggtgcaatgttttcaacaaagacatcagccttcttagccaagtcgtacataatctttttaccttcatcagtcttgatgttcaaagtcaaagacttcttgttggcgttcaattgcaagtagtaaagactccatgaatcttgaatatcaagtaattcatttctagtagggtccccagtgttagtacgttcaatcttaataacttcagcaccaagccatgctaaaagttgagtacatgatggaccttattgaacttgtgtccagtcaacaactttaataccttttaaaggtgcatattcattttcttcagtcgtgattaattgtccttatcttcaagttgtgctaaatctaattctgggtttaagttaccaatgtgaccagattccttacccattgattcaggaatttgagcatcaataattgaaggattacctgattcgtaggccttttcaagagcatccttcatttcagcgtagttacttacacggtagctgtcaccaccaaaggccttagcgatttcagcatagtgagcattgtggcttaaaacagtaggtcctaattggtctttaactgggttacggtcaccattgtagataccaccattgttaatgatgacaacggtaacaggtaagtggtaacggcagataatttccatttccattccgtccaaaccaaaggctgagtcaccatgaagtgagatgactttcttaccagtttcaacagctgcagcaatggcataacctaggccgacacccattacgccccaagtaccagtatcaagacggtgacgaggcttttgcataccgattaagttacgaccaatgtccaaagtgttggcaccctcacttacgatgtaagtgtcagggtgcttttgcatcaagttattgataggttcaattgcactgtagaagcctaaagttggcttagcttcagaatcagcgattcttttagcaaatttttcattgttagcttcacaggcattcttaattgaatctagccagtcttgaggggccttaacgttagctttttcaaggggtgcgtttaatttttgtaaaacagaagtaatgtcaccttgtaatggggcatcgatctttctgtttgaatcaaattctgttgcgtcaatatcgacttgaacaaacttagcgtcttcattaaacaatggagcctcaccatttgaaagcatccaattaagccgagcaccgattaataagactacatcggcttgacctaaagtaaatgaacgagctgaagcagctgatgatggtgagtcatctggtacaacgcctttagccattgacatcggcaaaaatggaataccagtcttagtaactaattctctgacttctgcttcacttctagcataagctgagcccttacctaggataatagcagggtgtttagcgttctttaataattcaacagcacggtcaattgcatcatctgatggcaattgctttggagctggatcgactacttcatagatatgagcgtctgacttttgtgcaactgtgtcggcaactgttgcagcaggaaggtcaaggtaaacaccaccaggccgaccgctcatagcagttctaacggcacgagcaactgctaagcccatgtcttcagcacggtcaacacgataagctgctttacataaaggtttagcaacattgtattgatcaagtccttcatagtctccacggtcgaggtcgatgatatgacgatctgatgaacctgagatcataatcattgggaagcaattcttagtggcttctgctaaagcagttaaaccatttaagaaaccaggagcagaaactgttaaggctacaccaggcttgccggtaagaaaaccagcagcagcggctgcgtctacagctgcatcttctcttctaaattcataaaacttcataccctttaattcagctaaacgggcaaagtcagtaactggaatgccgacaccaccatgcatgttgtttaaaccgtttgcttgtaaagcatcgattaaaagtgcagcaccagtaagtgatacatcttgtgtcacgaaaaaaaattctttcaaaaaatccccaaatgcttatgtttatgcatttcaaaaccaagatacacctcttgaattgtatatacaggcacaattgaataataaggtacgttattttaatatgcgcatataaaaataagcaagtcctaatatattagaacttacttattatacttttattcaaaattgtccatttcttcgattgccttttcccaggcagaatttgcttcatctaatttctgttgtacatcagaaagctgttcttgcagtggccccaatttatcaaagcttgaagcaatttctggattggccatttcggtttggatttcttgctctcgttcttcaagctgttcaatttgtttttctgcattatcaattgcacgctgcaactttctcttttgagaatcacgttgcttttgctcttggtaagaaagtttttgctggctaatttgtttgcttggctcgacttctgtctcagcggcactattttcagccatagctgcttgttttgccttctcatcaagataataagaataattgccatcgtagactttagcatgcccatcgcgaactaaaacaatcttattagctagttgattgataaagtaacggtcgtgggaaacaaagagcagggtaccatcaaagtcttttaaagctttttctagtacttcttttgcttcgatatctaagtggttagttggttcatccatcagtaagaagttatcatgttcaagtgataaaacagttaaagttaaccgtgctttttgtccaccagatagttgacctacggtcttatcaatgtctttagctgtgaataaaaagctggctaagattgaccgtacatcgcgttcaggcatggtcttatgacgatccccaacagtatccaatacagttttagatggatctagtctttgtaattcttggtcgtaataaccaatctcaagggatgcgccatacttaattgagccactcttgggcgttaattgcttcataatagtcttaagcagggtagatttaccgattccatttggtccaatgatcgcgacgcgatctcctttattaatctggaaggaaatatctttaaccatggttttatcgggataaccaatcgtcaaatcgttgaaaattaatacttccttgccagaaggatgatcgcttgaaaaatgaatccgtaccttatttttatgtttaggtggagtaatccgctcaattttttctagttttttacgccgactttgtgcacgcttagtggtagttgctcgaaccaagtttttttggataaattcttcatcttttttgatttcagcttgttgcttttcataagcggcttcttggtccttatcacgttgctcgcgctgcatgacataggctgaatagttgcccttaaaagcagttaatttaccaaattctagttcaaaaatttgggctgctaaatgatctaagaaatattggtcgtgggaaaccacgaggattgcaccactgtaattctttaaaaatccttccaaccaatctagggtatctaaatctaagtagttagttggctcgtccaataacaacagagcaggtttgcgcaaaagcaacttaacaaaagctaaccgtgttttttcaccaccggataaactaccaatcttcttttgccaagtgtcttcaggaaacttaaagccattcaagatacttttaatatcagattgataagtataaccgcctttttgttcaaagttgaattgcttttgatcgtattgcttaagcaattcttgatcttcaggatgatctgcaattttttcttgtagttggactaagctttttctttcccttattaaaggagcgaaaacggtttccatttcatcccaaatggttttattttcatctaatgcattttcctgagcgatataaccaacatcaatgcctttattaactgtaaattcgccgtgagttggttcttgctcacctgtcattatttttaacagggtagtcttaccaaccccgttaggaccaactaagccgattctggcattggaatcgattgaaaaattaacatttttgaataatgtgttggccccaaattgttgttctaaatcgtgtccttgtgcaataatcataatttttcacctaaccactattctaccatatagcgcaaattgtttgtttttaagttaaatatgtgaaaaaatgatgatttgtgaaaaagatacttgcataagtactatcatagcaggtatgatagtagtgcttgattgtacattcacaaacatttaagtttggagggttcctatatggaaaaaataaaaatcccaaaagcaacggcaaaaagattaccattatattaccgttatttgattattttaaatgaagaaggcaaagataaggtttcttcaactgagctgtcagaggcagttcaagtagatagtgcttcaattagaagagacttttcatattttggtgcgttgggaaaacgtggctatggatatgatgtaaagaatttattgagcttcttcaagaaaattttgaatcaagatactttaactaatgttgctttaataggtgtaggtaatctgggacgggcgctgcttaattacaactttaagcgcagtaataatattcgaatttcctgtgcttttgatatcaataaggagattactggtcgtatcttaagtggtgtccctgtttatgacatggacgacttaaagcaacaactaagtgatcaacagattacaattgcaattttgacagttccttcaacagctgctcagaaaaccacagatgaaatggttgatgcgggtgtaaagggaattatgaactttactccgattcgtttatcagctccagctgatgtgcgagtacaaaatgtagacttagcaaccgaattgcaaacgttgatctatttcttagatagtgacaaagaaaactaaatttgagtaaaagaaacatactaacctagtgttggatcatgaatcgacggattcacgatctggcactttttattttgtctaaaatagaaagtgaagataaagcaaatcaagtcttcagctttttagacacttgatgtcgtaaaagaaacggactgctttaccacctattcttaagtctcttcgaagtctgtgggcacttagatgccgtgtttagaaaattagaattaataggttgataaagaggtttatcttcacagcggaggttatattatggaatcacaaattattttcggtattgatgttagcagtaaatcttccacagtttgtgtggttaatgaccggatcaaacaaggcgaatcttttagaatctctaatgattcctttggctatcaaaaactttatgagcaactgaaccaatatttgataactcctttagttgttttcgaagctactggtgtttattctctaagcctgcaagctttcttagaggattatcatattaagtatttgaagcttaatccgcttaaagcgaaaaagctaatggacaataatttacgccataataaaactgataaggtagatgcttatcgcctggctttaattcaatttaatgccccgcaaaagctgcgtgatccacagcccagagagtatcatgaacttcagaatgccagtcgctattatgaagaacttactaggagtatagttactactaaaaatcaattgcaccgcaacctccaatccactttcccacaaattgaagaaatactgtctcatccatctggcagaatttattgggcgcttgttagtcttttcccacatgctggatatgttctagaaaagaatgagacacaggtaactcaaatgcttaattctatttctggaataggacaacaaagggcacggtacttaaccacaagattatacgcttttgctagagaagcttatccttatgattccaaagatagtattatcgttagagctattcaaaggaacatttctaatttattttcactccagcaagaacgcgactatgtaattaactacatggaaaagctggctaaagcagtaaacgctcgtgctttatccatctatttgagtatcccaggggttgctagaattacagcagtgagattagtagcagagctcggtgatctaagacggtttagcacttcagctcaaattgatgcgtttgttggcattgatccaggaaggtaccaatctggtgaaaaagacagttctcttggcattaccaagcatggcaatcatattgccagaaaaatactttatcgagttattactcaaatggagacggtaaaggctacgcagccttgccatataactgattattatgacaagaaaaaacgatcttcaaatagacaaggctataagaaaatcgccattgcatcagtccataaactgatacgcacaatgtttgctcttatcaaacatgatcaattatatgattacaacatagccaccgaaaataaaagactttagctgaaatcaaataatcaacttaagtataagcaacctatggaaaaactacaagtattcataggcttatttgtggtactttcgctttttcttaaatttaaactcttatttgctttaaccttattcgcatcattaaaacaagtaaatttattttcttaaatcattgataatacttgactttgggtagaaaaaagccgattttcggctttttttcatgcagttgtttcacttttgattaatttgacaggcaaaatataattcttttggcgcaatttttcgtcgggattggaaattcgggtaagcaataacttaaccaataaagttgcaatatcatgaattggctgagcaattgtggatagttccgaatggtaagtttgaatttgctttgttccgtcaaaaccaatcacttttaattccttaggcactttaatgcctaatttttttgcttcttgtaaaactaacactgcagttaaatcatctgtgcagacgacgccatcaggctgatcattgactaacatatcatgaattttcatatttttaatgttggaagaatcagaaaaagcaactgaacgaatgtgggctgaaaagtgacattcctttgcttcatcaagataagctgctagtcgttcgtcagtcggattaccttttctgtgttcattgcccagaaagtaaattttgtgacaaccagcttgaaccaagtcatgtactgccaacttgatgccttgataattatcacaactaacaattggaacattatcagatagctttcggtcgaaagagacaattggcaaacctagttgttggtattcattgatacctagattgtgcgcaccagcgatgatgccatcaacttgattagcctgaagcatgcgcagatattcgcgttctttttctttgttttgtcctgcattgcataggattactttatagttttgttggaataaagtggtttcgatatcctgtactaattccgcaaaaaaaggattagtgatctcaggaaaaatcaaaccgactaatttcattttctttccttgtaatgagcgggcaatagaattgggacgataatttaattcccgcattgcggcaaaaactttatctttagttttttgacttaaatagccatggttgttgattactcgcgaaacggtagttacagagcaaccggcttttttggcaacgtcgcttaattttgctgccatagtatcacctgatgtttaaagaattgtttgcatttgccaaagcttgccagtgtagtcaatgtcttgagcaaacgcaatttttttgttggtctgatcggcaaagtagcgtccagtcaataccttttcaccatcattaacgaatacttcaattaatgaatgatcaacaaagatatcaagcttgaggtcatgatttggtgaaagcgtaatagctcgactttcgccataatcaactgctactttttgcccagcatgagcacgatctaatactaatttaccatttttggtatcgaaattgagctgtaaactgttacttaagtcattatttgcagctaaatgtaaagtgccactttggttagccttaattgttaattcaagttcaaattgttggccggcttgatcgctgactacttgattagatatgcttgcttcgtttttgcggatactgcttattgccttaactggcgtttgaattaacttgtcactctttaggtggagttccttcacttgactcaagcagttagcccagttttcatcatcagtagggtaagtagtgtcaggcaagccaacccaactgacttcgtaggcattaccatctggggcgttaaaggcctgagtggcataaacatcgaacccgtgatccaaattgtgtaatttacctggattaattaacttatgattttcccagtcaatatcatcagcaataacgtacatatttgggtaaatgtcatcataagctgctacttttttgtctaaaccctgaggacagaaaatgaccacgactttgccatcaacacggacgatgttgggacactcgatcatgtagcccatgtcttcgttggtaaagtctaagaagcccaattcttcccagttctttagatcctgagacttccaaacgtcaatgtgaccgtgtttttcctttttatcttgggcacctaaaattgcgtagtaagtgtcattttctttgataatttggggatcgcgaaaatgttcggtgatgtgatctggattcttaaataggatggttttgtctgaaactttattatttttatccatccaagcaccgatttgataaggagtacgtacccaattttcatcgcggtggttaccggtatacatgatgaaaagcttaccatcgatttcgcgagcagagccagaataagctccatgtgaatcagccattgtgtctggttcaatacctaagcctaagttttcccagtgaaccatgtcagttgatttgaagtgccaccatgactttagaccgtgaactgcgccgaatggatatgattgatagaagaggtggtaagcaccatcaaagtaggaaaatccattagggtcattaattaagccagaaataggatgcaaatgatagcgcatttggtaaggggagtttgcggcttgtgcttgcaaatgcattaatgtatcagcgtcccaatcttgataaggtaagtaacgtttttctcttgtccattccataaatatacctccatgaaagcgttgtctttttacatgtattttaagttagtatgaaaaatatgtcaaacgtttaacagaaaaaataattattaattcataagtaataaaataaataaagaattttatgtcaaacgattgacatattttttgaatgcgttatcataattagtgaattgagaataaaacgtttacataggagggatcaatatggaccacagaaaagtggctgaacgagtaattaaagacgtcggccgtgacaatattattgccggtgcccactgtgctactcgtctgcgtttagtattaaaagatgattcaaaagtcgaccaaaaagcattggataatgatccagatgttaagggtacttttaaaaccaatggtcaatatcaagtaattattgggccaggagatgttaatgacgtttacgatgagttcattaaaatcactggtttgaaagaattatcaaccgatgatttgaagaaggttgctgcagaaggtaaaaagaagaatccagtaatggatttcattaaacttttgtctgacatctttgttccaatcattccagccttagttgctggtggtttgttgatggctttgaacaacttcttgacttcaccaggtctgtttggaccaaagtcagttgttcagatggtaccgaatgttgctggtatttcaagtatgattcaagttatgtcagcagctccgtttatttttatgccaattctagtcggaatgtcggcagctaaacggttcggtgctaaccaattcttgggtgctacaatcggaatgattatgacgacacctggactccttggtgcaaatcacttctgggacatttttggcttgcatgttgcgcaaactaactatcaataccaggttattccagttttagtagctgtttgggtattgtcaattttggaaaagtacttccacaagcacttgccatcagctgttgactttacctttacgccacttctttcaattatgattactggctttttgacttttacaattattgggccagtcttcaaaggcgtatcagatggtattaccaatgctatcgtttggctatatgacactactggtgcctttgggatgggtgtctttggtcttacctattcagctattgttactactgggcttcatcaaagttttccagcggttgaaactcagcttttagcagcctttgctaagaatccagccagctctggtgactttatctttgttaccgcatgtatggctaacgtagctcaaggtgccgcaactttcgctgtttacttcttaactaagaacaagaagatgaagggcttggctagttcatcaggtgtttcagcacttcttggtattactgaaccagcacttttcggtgttaacttgaagtataaattcccattcttctgtgccttaattggttcaggtgtagctgctgcttttgcgggcttgatgcatgttactgcagccgctcttggttcagctggtttcttaggcttcctttcaatttatcctaagactattccaatgtgggttgtttccgtattaattagttttgctgttgccttcatccttacttatgtttatggtaagggtcatttgaaggaagaagttgctgaacaagatgttccagtaaacgacgcaactgattatgctgaagaaactcaaaaggctgaaaagcttggtaaggaacaaatggcattaaaggatgaagttattgcttcaccagttgatggtactcctgagagtttaactaaagttaatgatcaagtattctctgctaagttaatgggtgatggtgcagccgttattccaagtgatggtacgatctattcaccagttactggtactgtgactattgcttatgaaactaagcatgcttatggcattaagtcagacgatggtgcagaagtattgattcacattggtcttgatactgtaaaccttaagggcgagcacttcgaaagtttcgttaagcaaggtcaaagagttaacaagggcgataagcttggtacagttgaccttgatgctgtgaaaaaggcaggctatgatactactgtcatggtagtaattactaacactgccaactatgcaaatgtttcaagaattactgatgcgggtgacaagcacggcgacaagttgattgctgttactgcacacaattagtttcttctactcctctagaaaaaattaaaacaattagaataaaagacgctaagaaagattgtttcttggcgttttttagtactaagtgttgcacttcaattttaagtttgagtaaaatgttctctataaagaaaaacaaagtgagggtatgttttatgaagttaaaaagtggagttattggagtattagtaactggattaactgtctttagcattaatctaactagctctaaaataaaggcagcgataacagtgcctaatcctaagacagattatgtagttaaaactacttctaatgtgtataagagtaatggtaagaggaccagttttaagacacgtggtcagatacaaaccggtaatgttccagtaattgaatcacaactatatgaaggcaagttcattaatgtgcaaggaactaagacgattaatggtactgcttattataagatcggtcctaacgcatacattaaacaaaataatgttttaaattatgctcaagaaaaagcaaagcttgaggcatatcaggcacaagatgatgtgaatgatgattcagatcagtcaacagaattaagctctgatgatgtgaattttgacatagcttggtatgacaacattaatgaggatccatctccagcgatgttcgatgattcaggatatcataatagagtgattaagaatgctcgtaaattattaggctatttcacttatggaacaggtgcataccgaactaattttggcagttggcgtcatcctaataaaaacggttcaactgattgttcaggatttgtgtggatcgtaatgaagagagcaggatatcgtgtaggaaatgctccattttttactctgccaatggaacgagatgctaaaagtactcatggctatttgaagaaaatttctgccaagaatattcgcccaggtgatattgtgattgttaatactggcaatggtgttggtcaaaacggacatgcagcaattgttgatggcaaatatgatggttgggacacgcaaattattgaagagggcggcaacttaggtgtagatgatgtgcaccgctctagtttaggtagctcactgagcgataagctggccaaaggtcgaatcacttatgctcgccccgttaaatagtatgctctatgctataattttgctaatcaataaaggataataagaatgaaaaagaacagcacgcttaaacatgtctggattatgacggctgtctattgggtagtaggtattctaagtattttctggggtaagcttgatcatacttttgcgtctcaattaaaagagatcaataatatttacgtgttagttttaataattatcttaagcttgccgctacttttatcgctgttattgtcggttaaagtaaaaatgccacgtttgatctgcaatccactagttgctgtaatttatctattagtggtaattgcagcaggtgtagcatataacttacaaaatattattggctacttcttcccaatcatcctcttcattattatggcgctagttgctgttttctatgctttggttaagacttttagcagcagaaaaagtggtaaatatttttttattgatggtaaagataagaaagaatgccatgatttctgggatgcttataagaagtactatgtaatgggattaacttacggcattattgatggtttgattactgtaattagttaaaaaagttaagaaaaatcaaaattagcactcaattgaaaaaagtgctaattttttcttgctttttttcacaaaacagtttattatcatatttgtaagttagcacttagcaaataagagtgctaatgattaatacagtaataaaaaatataatgaagaaaattaaacataagggggactaaacgtgttacaaccaattggtgatcgcgtgatcgttaaagttaagaaagaagaagaagaaactgttggtggcatcgttttagcatcaaatgctaagaagaagccaactgaaggcgaagttgtagctgttggtgaaggtgcttacgcatcaaacggtgaaaagattccaatggctgttaagaagggtgacgtagttctttacgataaatactcaggcactgacgttgaatacgaaggtgaaaagtacttagtccttcacgaaaaagacattttagctattgctaagtaatttagttaaaatttccaacgataattaagtaaattaaggagcatagataatctatggcaaaagatattaaattctcagaaaatgcaagacgttctcttttaaagggtgttaataagttagctgatactgttaagactactattggtcctaagggtagaaacgttgttttggaacaaagttacggcaaccctgacatcactaacgatggtgttaccattgcaaagtccatcgagttaaaggatcactacgaaaacatgggtgctaaacttgttgctgaagctgctcaaaagactaatgatattgctggtgacggtactactaccgcaactgttttgactcaagcaattactaatgaaggtatgaagaacgtaactgctggtgctaacccagttggcattcgtcgtggtattgaaaaagctactgaagctgctgttaatgaattgcacaagattagccacaaggttgaatcaagagaccaaattgctaacgtagctgcagtttcatcatcttcaaaggaagttggtaacttaatcgctgacgctatggaaaaggttggtcacgatggcgttatcactattgaagattcacgtggtatcaacactgaactttcagtagttgaaggtatgcaatttgatcgtggttacttatcacaatacatggtaactgacaacgataagatggaagcagatcttgataatccttacattttgatcactgacaagaagatctcaaacattcaagatatcttgccacttcttcaagaaattgttcaacaaggtaagtcattattgatcattgctgatgacgttactggtgaagctcttccaacacttgtattgaacaagattcgtggtaccttcaacgttgtagctgttaaggctcctggctttggtgaccgtcgtaaggctcagttacaagatattgctgctttgactggtggtactgtgattactgatgacttaggtcttgaattaagggacactaagattgatcaattaggtcaagctcgtcgtgtaactgtaaccaaggactcaactactattgttgacggtgctggttcaaaggatgctattcaagaacgtgaagattcaatcagaaagcaaattgaagaatcaacttcagactttgacaagaagaagcttcaagaacgtcttgctaagttaactggtggtgtagctgttatccacgtaggtgctgctactgaaaccgaattgaaggaacgtcgttacagaattgaagacgctttgaactcaactcgtgccgctgttgatgaaggttacgttgctggtggtggtactgctttagtagacgttgagaaggctatcaatgatcttaaggctgatactgcagatgaaaatactggtatccaaatcgtattaagagctttgtcagcaccagttcgtcaaattgctgaaaacgcaggtaagaatggtgaagttgttttgaaccacttactcaagcaagaaaacgaaattggctacaatgctgctactgatacttgggaaaacatggtagatgctggtatcattgacccaaccaaggtaaccagaaccgctttgcaaaatgctgcttcaattgccgctcttctgcttactactgaagctgttgttgcagaaattcctgaagaaaagccagctaacccagctccacaagctggtgcaccaggaatgggtatgtaattatatatcttaatgctttagcatttagatatataattcttgattacgaagtaatcaagttcatttacagtgctttagcactaaacttatgcacaaactctcactctagttcaaaaacaaatataattaaaatgacttcgaagttaaacaatcagttcagcttcgaagtttttctttttgtagcgtataatattgtacgtaactctatctaaaatacgaaataggaaagagacataaatgacggaaaaaacaactccaatgatggagcaatattacgaaattaaaaaacaatatcctgatgcctttcttttttatcgcgtcggagacttttacgaactgtttgaagatgacgcagttaaaggtgcacagattcttgaattgactttaacgcaccgatcaaatagaactaagaatccaattccaatggcaggtgtgcctcatatggctgtggatacttatgtaaatactttagttgaaaagggttataaagtagcactttgtgaacaacttgaggatcctaaaaaggccaaaggcatggttaaacggggaattattcaattagtgacgccgggaaccatgatgaatgaaggcccaaatgatgctaaagattcaaattacttaacatcagtaattaccactaagagtggctttggtttagcctacagtgatttatccactggtgaaatttatgctactcatttaaagagtttcgatgctgtttccaatgagctcttgtcacttcgtactcgtgaagttgtgtataacgggtcattatctgaacaaaataaagactttatgcacaaggccaacattacgatttctcgacctactccaattgaaggtgaacatgctgaaatttcttatgttgaacagaatttgactaatggggctgaaaaagaggctacccgtcagttagttggctatttgctttcaactcaaaagagaagtttagcgcacttgcagattgccaaaagctatgaagtaaatcaatatttgcagatgtcacatactgtgcagaataatttggaattggttgcttctgccaaaactggcaaaaaaatgggttcacttttctgggttttggataacacacacactgccatgggtggacgcttgcttaagcagtggctagctcgtccattattaaacatggatgaaattaaccatcgtgaagaaatggtgcaggccttgcttgatggctactttacacgagaaaatgcagttgatgccttaaagggtgtttacgacttggaacgtttaactggtcgaattgcttttggtaacgttaatgcgcgcgaattactacaattatcacgttctttgcaggccgttccagttattttagatgctttagagcaatcagattcagatatcttggtcgattttgctaaaaaaattgatccattaaagggcgttgccgaaatgattacttccactatcgtgaaggatccacctgtgttgactactgaaggtggcctgattcaaggtggggttgatccgcagcttgatcgctatcgggatgccatgaacaatggaaaaaaatggttggctgaaatggaagcagatgagcggcaaaagacaggtattgataacttaaaggtcggttataacaaggtctttggctattatattcaggtttctaacggtaacaagtctaaggtgccacttgatcgttatacgcgtaaacaaactttgactaacgctgagcgttatatcacaccggaactcaaggaacatgagaatctaattcttgaggcacagacacggtcaactgacttggaatatgatttatttgttaagctgcgtgaggacgttaagaagtatatccctgctttacaaaaattaggtgggcaactagcagcgctggatgtttattgtggttttgctacagtagctgaacaaaataattattgccggccaacttttcacgcagataatcaagatattaatgtgactaacggccgtcatccagttgtggaaaaagtaatgacggctggttcatatattcctaacgatgtcaaaatggatgaaggaaccaacatttatttaattacaggtcctaacatgtctggtaagagtacctatatgagacaaatggctttgattgcgatcatggctcaagtaggttcctttgtgccagctgatagtgctgatttgccaatttttgatcaaatttttacaagaatcggagcagctgatgacttaatttcaggtcaaagtacctttatggtagagatgagtgaagctaatgaagccttgcagtatgctactaagcgcagtttggttctctttgacgaaattggtcgtggtacggctacttacgatggaatggctttagctggtgcaattgttaagtacttacacgacaaagttggtgctaaggcattatttgctacgcactatcatgaattgacagtgatggatgagactctggatcatctgaaaaatattcacgttggtgctaccgaagaaaatggcaagttaatcttcttgcataaaatcctacctggacctgctgatcaaagttacggaattcatgtagctcaattagcaggtttgccgcgcaacgttttgcgagaggcaactaaattattaaagcggcttgaagcacaaggcagtgaactagcaccagtttcgcagcaattagatttatttgcagagcctgtggaaaacagtgttgaagaaactgaaacacaaaatgacaagcccgcaataactgatgcacaacaagatatacttgatgatatttctaatctttatttagcagataagacaccgttgcaggttatgcaaatggtagctgattggcaaaaagatttaaaggatgacgattaatgagcaaaattcatgagttatcggaaactttaactaatcagattgcagccggagaagtaattgagcgcccagctagcgtagttaaagaattagtagaaaactcgttagatgctggtgctactcgaattcgcgttgattttgtagatgctggtttgaaacagattgtagttcaagacaatgggacggggattgcacgtgatcaagttgatctagcctttacccgacatgcgacaagcaagattgccaatgaacacgatttatttaaagtttccactttaggcttccgcggagaagcattagcttcgatttctgctgttagccatgtggaaattctgactgcaactgaaaacgcaattggtattcgagctaactatagtggaggcaataaaaaaggccaagaagatgcagcggctcgtaagggaacaaaaattacagtcaaggatttgttctttaacacgccagccagattaaagtatttgcgtagttcaagaactgaaattatgaagattgtggatattattaatcgacttgtgttaggttatccacatgtgtcttttactttgtcaaatactggcaaaattttattaagaacgccaggaaataataatttaaagcaaacagttgctaacgtgtatggccgtcatatcgcagaaaaaatggaaaaatttgaggcaaaagacagcgattttaagattacaggtctgatgtctaaaccggaattaacacgttctacacgcaattttatttcgattctcttaaacggccgctatattaaaaattttcaattaaatactgcgattctggatggctatggctcaaaattagcagcgcggcattatccgattattgtgttagcaattaaagtagatcctttgttagtggatgttaacgtgcatcccactaaacaggaagttcgtttatccaaggaaaaagaactgggtcgtttaatcaccagtgcaattagtaatacacttgtggaaaaagttggacaaattagcgcttttgctaatttggaaaataaacgtgatacgctagttgatcagcttagttttaacttaaatcaagatgttgtaaatacagctcgtaaaaaagaaccggaaattcgcgaacaagaaaagccaaaatttttaacgattgaatctgatgattcagaagataatattcaaaatgaggcggtaaagcaggatagtgaaaagaaatatgttgatcttaatcagccacgtgaagatgatcaatatatcgttactaagacctggaaacaaaatgttgctctgcagcaagcactaacgccatttcctacaactaggactaatcaggaagtcatttcaagtggggatgaaactttagctaataatctgcctcgcttggtttatgttggacagaccgatacttatttatttgcccaacataatggcgacctatttttaattgatcaggttgctgctagacgaaggttaaaatttgagcaaatttttcacatgataactgccaaaaaagtagtacaacaaggtttgttaacaccaattattttagaatttggtaatcttgattttatgcaaattaaggatcaagtagaacagattaagcaggttggaatctatttggaagattttggacaaaatagttttattgttcgttcgtatccaacttggattcacgataatgtcgaagattcaattcggaagattttagatggttatttgaatgtggataaaggaaaggcaaagaacctgtttagccggatagcagcaatgcaagctaagcgagaaattactggcaagattaaattatctgcagctgaagctgagcaaattttacttgatttacgcaagtgtactgatccatatcatgatgcagatggacggataattttggttagaatgagccaaaatgaattgagaaaaatgtttaagaaggatgaataatgtacgaatattttgaaggtgtgattactgtggttacaccaagctatgttgtagttgatgtcgggggcgttggctacaaggtctatagtcctacaccttttgcctatactcaaggccaaaaagctaaggtctttattgagcaagtggtgcgtgatactggcattactttatatggttttcaaagtcaagatgataagggcttgttcttaaaactacttagtgttagcgggattggtcctaagagtgcaatggcaatcatggcagctgaggatagtaattctttggcggaagcgattgaacaaggtgaagttaagtacctaactcgttttccaggtgtgggtaaaaagacggcttcacaaattgtgcttgatttgaagggtaaattaggtgattatgttgctcggcttgatcgtccagacaatggtgagaatgtgccgccagcattaaatgatgcactgcttgctttaattgctttgggttatacccaaaaagaagtggatcggatcacgcctaaactggagaaagttgctgcaaatactgcagatcaatatattaaaaagggcttagcattactgcttaaaaagtagatcttggtataatagaacagatgattattttttaaggaagtgaaactggtggcagaagatcaagtaacttcaggtgatattgagaatcctgaagaacaacaaatggaactttctttgcggccgcaaacgctcgaccagtacttaggtcaaaagcgggtcaaaaaagaaatgagcatttatattaaggcggcgcgccaacgtgatgaagcattagatcacgttttgctttatggaccaccggggttaggaaagacaactttggctttcgtaattgccaatgaattgggagttcatttaaagagtacaagtggtccggccattgaaaaggcaggcgacttggtggcacttttgtccgacttagatcctggggatgttttgttcattgatgaaattcaccgtttagctaagccagtagaagaagtactctactctgcaatggaagactactatatcgatattgtgattggcgaggggcagactactcatgcagttcacgtgccgctgccaccatttactctaattggggcaacgactttggctgggcaattgtcagcacctttgcgtgatcgctttggcatcgtagagcacatgcagtattacactatcgatgagctagaacaaattgttttgcgttcaagtgatgtttttcacacttcaattgcgcctgaggcggcccatgaattggcacgacgctcgcgtggtacacctcgtgttgccaatcgcttacttaagcgggtgcgtgattttgcggaagttaagggagaaaaaacaatttcgctcgagactactgaaggcgcgttaaaacaattgcaggttgacgatgagggacttgatcagacagaccgcagattattgagaacgatgatcgaaggatataatggtggtcctgttggtattcggactttggcagctaatgttggtgaagatatggaaacgattgagtcactatatgagccatatttgttgcagcatggttttattttactcacgccgcgtggcagaatggtgacggataaagcatatttacagttaggattaccaattccaggtgataaatagtcccattttctgtataatggttataatatctagaaaataattttaatgaggtggaaattttgaacattttatttttagcaaatgccggtgctgcagcaagtagcaactggatgatgatcggtttatttattattttgatcgctttcacttactttggtatgattcgtcctcaaaagaagcaacaacaacaaagaatgcaaatgatggacaaattgaagaagggtgacgaagtcatcttagttgatggtttgcatggtaaggttgacaagatcaacagtgataagactatcgtggttgatgcagatggcatttacttaacttttgaaagaatggctgtccgtcgtgtgattccagttgctgcaccagcaactcctgcagctgaaactaaggctgaagctccagcagaaaagccgaaagaaaaagcagacgaaactaaaaaagaggataagtaatcatattacttaagagcgtcattttaggcgctttttgttttgctaaaaaaatccttgttgtaaaatagaagtgataattttagttcaaagaaagggatctgaaatgaagaatattcccgttgtaatgattctttttggtggtagtggtgatttggctcaccgcaagctttatccagctttgtttaatttgtatgaacaaggcttaattcacgacaactttgcagtaattggaactgctcgtcgtccttggtcacatgagtatttgcgtgagcaggttagtgatgctattcatgaaacgcacgatactgttgatgaaaatgagttgaaagcttttgcaagtcatttttattatcaatcacatgatgtaactaatgtggaacactatgagattttgaaaaacttggcacaagagctcgatgatcgttatagtgcacaaggcaatcgtctcttctacatggctatggcaccaagattctttggcacaatagcaacgcatattaatgaccaagacttgactggtagtggctttaatcgaattgtagttgaaaagccatttggtcatgatttggcttcagcagaggaattaaataagcaaatcacggcttcatttgatgaaaatgatatttttagaattgaccactatttaggtaaagaaatggttcaaaatatcatgccaatgcgttttactaacccaatggttcaaaatatttggtgcagcaagtatattaagaatatccaagttaccttggcggaacgtcttggcgtggaagcacgtggaggttactatgatacttcaggtgctttgcgtgatatggtacaaaaccatatttttcaaattattactctgctagcaatgccagaacctaaggatctttcttctgctagtgttcaccaagccaagcaagatttgcttaagagtttaattattcctacgccagatgatgtcaagaaatactttgttcgtggtcaatatttgggtagtgatactacttttgcttataagcaagagccaaatgttgatccagagtcaactactgaaaccttcgttgcaggtaaagttaagtttaatgagggaccaattgctggcgtaccaatttactttagaacgggtaaggaatttaaagaaaagaagaaccggattgacattgttttaaagcatattaataatccatatgggcaagctcattctaacaatattacgatcgtgattgacccaactagtgaaatttactttactattaatggcaaacgaattgaccaaccaggaattcgccgtgaaaacttaacttatgaattttcaaaagccgaaatggctaaggtacctgatggttatgaaagattgcttcatgatgtttttgtcaatgattcaactaactttacgcactggagcgaattgaagcgttattgggaatttatcgatgcagttgaagatgcttggcagaaggaaaatgaagcaggcaatccagccattgcacaatatttgccatacagaatggggccaaaggaagctaatacaatctttgagtcaccaactgaacattggatttatgaataaagaaaatttattaccgcaaaatgacatccatcgtcggattattcatctggacatggatgctttttatgcttcggttgaaatgcgggagcatcccgaatggaaaaataaggcattgattgttgggcaagatccacgacaaaatggtggacatggagtagtggctacttgcaattatgtagctcgtaagtatggcgttcattcagctatggccgcaattcaagcagtacgtttggttcccaaggagctaatagtttttactagaccacgatttgataaatatcgtgcagtgtcagctaaaatccattcttttatgcatgatgtgacagatcaggttgaatcagtggctttagatgaagcttatctagacgtgacacatccaaagatagagcaggagtctgcagttcaaattgctttagatttacagaaaaggattcggcaagaagtaggcttaaactcgtcttttggcgtttcctataataagtttttagctaaaatgggatcagaatacgccaaaccgtttggtcgaaccgtaattttgcctagtgaagtgcagaactttttagcaatgcaaaagattgagaagtttcctggtattggaccgaagacgcaagaagagctgcatcagatgggtgtttatactggggcagatttacaaaaaattgaggttttaaccttaattaaaaaatttaagaaaatggggtatattttagcccaacatgcacgtggaatagatttaagacctgttgttacagactcagaggctaatcgaaaatcaattggcatggagcggacttacgagcctgcaatttatactgaggatgaagccctaaccaatattcgtaactattgcaatcatttggaagcagcattaaaaaaacgcaattttaaggcaggtactgttgttattaaagtaagaaataataattttgatacggtaaccaagagaaaaaagttgaaaacaccttctgatagtcacttagatttttatgatgtggctcgtgacttgttcgaagcaacaagttcctttttagatgatggaattcgtttattgggagtcactgtaactgactttgaaaagaaaaaatatcaatcaatcagtttgttcgactaataaataaagctatttttctggtaaactagatacagatatttttacaagatgaggagattaaaaatgagtagttttgatgacatttatgaaaaaatcttacaatatcctacaattatcttgcaccgccacactagtcctgatccagacgcaattggttcacaagctggtttagctagagcattaatggaaaaattcccggacaagcgcatactttgtgctggggaaaacgatgaaggcgacttagcttggattaaccacatggatcaagtcaaggcaactgattacgaaggtgctttggtaattactactgataccgctaatacaccaagaatttctaataagttgtatgataagggtgactttttaattaagattgaccaccacccagatgttgatccatatgctgatatgagttacgtagatccagatgctccagcagcatgccaaatcattgtagacttcttgaatgaagagggctttaagattaccaaggaagttgcttacccactttatgctggaattgtaggcgataccggtcgtttcatgtatccagaaacttcagagcatacttttaaggtggctgctcaattagcttctactggaattaacattactgaaatcgctcgtaatattgctgatgtaacttttgatgaggcaaaattgcaagccttggcaatggacaagatggaaattgatcccgttggtgcagcttttacaattttgatgcagtcagacttgaagaagttaggtttgactgatgatcaagcaaatgttgctgtatctactccaggacgtattaaagatgtgcttgcttggaatgtttttgttgaaaaaccagatggtactttccgcgtacattaccgttcaaagggccctgtaatcaatgaattagctgctaagcatgatggtggtggtcatgcattagctagtggtgctaacgctaaggatatggacgaagtaaagcaggtatttgcggaagtcgttgaagtaactaagaagtttaaagaagatcatgaataatatttttatagattcaagaattaaaccagctattcaggctggtttaaagaagatccattttgaaaagccaactaaggtgcaggagaaagttattcctgctatgttgtctgacttgagtgtagtagtgcaagcagcaaccggttcaggaaaaacgcatgcttatttagtaccaatttttaatgaaattgaagaagataaacgctatgttcaagcaatcgttactttgcctagtcgtgaattagccgatcagctttatcaagtagcacggcagctccgtgatgcggcagggatgcatttttcaattgcacatcttgcgggcagaactgatcgtgaacgtcaattagaaaagtatcaaaataatactccacaattggtgattgcaactccaggacgtttgttagactttgttcaaaagaaggtttttgcagttgatcaagtaaaaacttttgttatcgacgaagctgacatgaccttggacatgggctttttgaacgacattgatcaagttgctgctaaattgccgaaggatgtccaaattgctgccttttcagcaactattccagttaaattgtctaactttttacgcaaatatatggctcatcctgatgatatcgttattgataatcctagtgttattgcgccaacgattaaaaacgatttgcttgatattggctcaaaggatcgcaagaatgtcttgtacaaattgttaactatgggacaaccatatttggcgttggtttttgctaacactaagcaaaaggttgatgagttgactaattatttgcaagatcagggtttgaaggtagctaaaattcacggtggggtaactgaacgtgaaagaaagcgtactctgcgtcaggttgagcaaggacagtatcaatatgtggtagctagtgacctagctgctcgtggcttagatattgatggtgttagtctggttgtcaattatgaaataccacgtgatattgagtttgtaattcaccggattggtagaactggccgtaatggtttgtcaggtcacgccattactttgattcgtgaagaagaaatgaaccggattgaagacctagaaaaaatgggtgttcattttgactttgttgagattaagaatggtgaattagtgccacgtaaacactatcgcagtcgtgaaaatcgtcaaagcaagaatcgtaagcttgataccaagctggtgggttacgttaaaaaagagaagagaaagcgtaagccaggttacaagaagaagattaagcgtgcgattcaagaggataatcgtcaaaaacgtaagttggaacagcgtcatgaggttcgtaaggcaaaacgtttgagaaagcgcaagcgtgaacaagggctttgacagaagcggattttgtagtacaattatttcagcttaagatatgttttttgatcaattatttcaaagagagagccagttagatgagaatggcttaataatagtcaaaaaatgctcctttaagtttcataattaagaatatcaagaggtaacaaacactgttgcaatcaaggtggtaccgcgcgtggagcgtccttgaagaaagcaatagtgttttttatttatttttagggagatttattttaatgaagaaactaaatagttcagagtttcgccaaatgtttttagacttcttcaaggatcatggtcacatgattatgccaagtgcatcattaatcccacaagatgacccaactcttctttggattaactcaggtgttgctaccatgaagaagtactttgatggctcagttgtaccaaaaaatcacagaattacttcatctcaaaagtcaatcagaaccaacgatattgaaaatgttggtaagactgcacgtcaccaaactttctttgaaatgcttggtaacttctcagttggtgactactttagagatgaagctattccttgggcatgggaattcttaactagtcctgattggcttggcttgccaaaggaaaagctttactgtactgtttatccaaaagatgaagactcatttaatgtttgggtaaaggcagggatgccagctgatcatattgttaagttggaagataacttctgggatattggtgaaggtccatgtggtcctgatactgaaatcttctacgaccgtggtcaagaaaacaacgacgttgctgaagacgatccagaaaacttccctggtggtgaaaatgcacgttaccttgaaatttggaacatcgtattttcacaatacaaccacttgccaaatggcaaatatgtagaccaaccacacaagaatatcgatactgggatgggactagaacgtgtgctttctattttgcaagatgcaccaaccaactttgaaaccgacttgttcttgccaattattcacgccactgaagaaatgactgatgacaagaagtacggcgttaacaaggaagacactactgctttcaagattatcgctgaccacgttcgtgccgtaagttttgcgattgctgatggtgcgcttccttcaaactcgggccgtggttatgttcttcgtcgtttgatccgtcgcgcagacttgaatggtcaacgcttaggaattaagggtgccttcctttacaagttggttccagttgttggaaaaatcatggaaagtcactacccagaagttatggatcaacgcggctttatcgaaaacgttatccaaaacgaagaagaaagatttcaatcaactcttgatactggtttgactttgcttgacgacttaatcgacaaggcaaagaattctaaggataagaccatttcaggtaaagatgccttcaagatgttcgatacttacggcttcccatatgaattgacttttgaatcagcacaagatgctggccttaaggttgacaagaagggctttgatgcagaaatggctgctcaaaaagagcgtgcacgtaaagctcgtggtgaccttcaatcaatgggacgtcaagatgtaactttaatgaacattaaggataagtcagtctttgaacgtgatacttacgaagaaccacatgcaaagctagttgacattgttgttgatgataagttggttgataaggccgatggcgaacatgctactttggtctttgacaagactccattttacgcagaacgtggtggtcaagttgccgaccacggtgacatttacaaccaagacggtgaattggttgccaaggttactgacgtacaacacgctcctaatgaccaaaacttgcactttgttgatttgattttgccagttgaaaagggtcaagaatacgtattgaagttagataaggaacgtcgtgaagggttacgtcactctcactcagcaactcaccttcttcacgctgctcttcgtcaagtcttaggtgaacacactcaccaagctggttcattagttgatcctgactacttaagatttgactttactgcaatggaaccaatgaccaagcgtgagcttaagaccgttgaagaattggttaaccaaaagatttgggaagctattcaagttaagactactatcactacccctgaagagggtgaaaagatgggtgctttagccctctttgatagcaagtacggtgataaggttcgtgttgttcaaatgggtgacttctcaagtgaattctgtggtggtactcacgtggacaatactaaccaaattggaatcttcaagattacttcagaatcagctgtcggtgctggtatgcgtagaattgaagctgtaacttctaagaaggcttatgaatacttggcaaaccgttcagacttacttgatgatattcaagaagaagttaaggcaaccaagccagataacattgtcgataagattgattcacttgaaagtgatttgcacgatgctcaaaagcaagttgaaactttgaacaagaagatcaatgctgctaaggctggtcaaatctttaatgacgttaaacaagctggtgacttgactgtcattgctgctactgcagatgttaacgggatgaatgacttgcgtgaacttgctgataactggaagagcggcaacaagtctgatgttttagttttagctgctgaaaatgctggcaaggctaatatgattattgctttagaccaaaaggcattagacaagggccttaaagcaggtaacttaatcaagatcgctgccccaatctttggaggtggcggtggcggccgtccaaacatggctcaagccggtggtaagaatccagcaggcttgaatgatgctattaaggcagttattgacgaaatttctaagaactaagaattaattaattgtgtttaagctttttttcaagtaaaattgttgacaggaggaataaatatgagttcgctagataagactatgcattttgactttaatcagaacaaaggaaaaaatgtttatgatactctgcaagatgtttacaatgcgcttgaagaaaagggctataatcctattaaccagattgtaggttacttactttctggcgatcctgcttatattccacggcataacgatgcccgtaatttgattcttaagcacgaacgtgacgagattattgaagaacttgttaagagttatcttggtaagaataaataatgcgtttattaggtttagatgtaggttctaaaactgtgggagtagcaattagcgatgagctaggaattactgcccagaagttggagactatccagattgatgaaagcagatataactttggtatgcgtccattgaagaagctagtcagacagtatgaagttgacggtttcgtattaggtttacctaagaatatggatggtacttctggtagttccgtagctagaagtaaggcatacggcaaacgactagaggaaaagtttggtttacctgtacattattctgatgagagattgacaacaattgaatcacgacgagtacttgttgaggatgcagggatccatgatcgcaagaagcgtaaacaagtaattgatcagatggcagcggtgctcatcttgcaaaattatttagatttacaccgaaaggattaaaatggcagcacaagttaatggtgacgatcaagatcgtcaaattactttgattgatgatcaaggtaatgaagaattgtatgagatattatttacttttcattcagatgattatgacaaatcttacgtgcttctttatccagccgctgttggcgatgatgaagatattgaggtgcaagctttcagttatgatgccgatgatgccggcgatgtaacaagtagtgatttgcatgagattgaatctgatgatgagtgggacatggtccagggagttttaaatactttcttagatgatgaccgcttgagtggtaaataataaaaagaggactggctgtggctggtcctttttgttagttttagaaaaaagataaaaatgaacaagaaaatattagagattttagaatttggcgaaattactaagcgcttgagtaaattagcgattactggtcccgctaaaaaagaagcggaggaattattacctagtggtgattttgaacaagtacaaaatgagttaaagcagactttagctttgactaatttgctacgaattaagggacaacttcctttaacggactttcaggacgtacgtccaagtactaaacgtttaagcgtgaaagctaatttaaatgctaaggaattaggtaatttattattagtattaagtttagctcatgaaattaatgactttttggcagaaatagatccaaacaaactggatttaactgcaattgatgaaattttagatcaattagatgtgccggatcttttatttagagaattaaagaaatcagttgattatgatggtgaggtattagatacagcctcacatgaactagctcgtttgcgtcatgatatacgttctaatgaagaggaaattaagaataagatggatgcttatactaagggcaatagtagtaagtatttatctgagcaaattgtgactattcgtgatgatcgctatgttattccagttaagcaagaatatcgggcaaaatttggtggggtagttcatgatcaaagtgccagtggtcaaacactgtttatagagccggaagccgttttaaatcttaataaccgccaacagaatttaattgctcaagaaaaacaagaaattcgtaatattttgaagcacttatctaatttggctcgtgaagaaattactagtttgaataatattgcggctgcattaactgaactagatttcttgcaggctaaagccaagttagcaaaagaaatgaaggcaagtgagcctcgtctgacacaagaccattctttgaacttattaaaagcgcgtcacccattgattgacccagaaaaggtagtacctaatgacattcgtttaggtggtgaatttgatactatgctgatcacggggcctaacaccggtggtaagacaattaccttaaaaacagcaggattgcttcaattgatggcacagtctggattatttatcccggctgaagaaggtagcaaggttggcgtctttaagcaagtttatgctgatattggcgatgaacagtcaattgaacaatcgttaagtactttttcatcacatatcaatgacattattgcgatcatgaagaatgttgattctgagaccttagttttaattgatgaaattggtgcagggactgatccagaagagggtgctagtttggcaattagtatcttagactttttgcgtaaaaaagatgctaagatcatggtgacaacgcactatcctgaattgaagctttatggttataatcggccacggacgactaatgcctcaatggaatttgacttaaagaccttgtcgccaacttatcatttgcagattggtattcctggtcatagtaatgcctttgccattgcccgcaagctagggatgcgtgaagatgttgtcaaaaatgcccagaacttaatgtcagatgaagattctgatattaataagatgatcaccaagttgaatacgcaaaccaaggcagctactgtggctcgcaatcgtctgcaaaccagtttggatcggagccaaaaattggagcaaaagttgcaacaagcacttgattggtataaccaacgtgtacaaaaacagcttgattttgcacaagagcgagctaatgaagttgttgccaaacgccgtaaaaaagctgatgagattattgctcaacttgaaaaacaaaagaacatgggcgtcaaggaaaataagattattgaagctaaaggcgaactcaacagtttagagcgtcaggctaataatttggctcataataaggtcttacagcgtgaaaaacgtcgtcaccatgtaagtgtaggcgatcgagtaaaggtcctctcatatggtcagacaggtacgattactaagaagttatctgaacatgaatatgaggttcagatgggaattatcaaagttaaggttagtgatcgcgatattgagaggattgaaaagggcgaaagtactaagcctagacaaactgttagagcaaccagtgcggttagaagaagtaatgctcatagcgagctggatttgcgaggccaacgctatgatgaagcaatgactaatttggaccgatatattgattctgttttactggcaggacttgatacggttacgattattcacggtattggtactggtgcgattagaaaaggtgtttggcaatatctccgcagcagcaatcatgtaaagaactttaattatgcaccagctaatgaaggtggcaatggtgcaacaattgtacaattaaagtaagtataatagaatatacttataatataaataaatgaattgaaaaaatgtgaggtaataattatggttgaagcaattaatgatcaaaattttgaagaagaaactaagaatggtgtagcattagtagacttttgggcaacttggtgtggtccatgtaagatgcaatcaccagtaattgatcaattatctgaagaacgtcaagacgttaacttctacaagatggatgttgaccaaaatcaagatacagctaagaatttgggtattatggctattcctactttaatcgtaaagaaggatggcaatattgtagaccgaattactggttacactccaaaggaaaagttaaaccaaattttggatcaatatactgattaatttaaaaatcaaaaaaagcttgagacgatgttgcctcaagcttttttgatatatcacttattttgatttacttgcttttttagcaagtcacgaatttcttctaaatagtcggcctcagttggaccagcttctttttctttcttgggcattactctatttaaagccttgatcattaaaaataccacaaatgaaatgatcaagaagttaatgacagaattgatgaagctgccatatttaaatgtagcatccccaaccttaaaaacgaggttagaaaaatcaattttgccggcaaagatcccaagtagggggttgatcaagttttttactaaagattgtacgatagcagtgaaggcagcaccgatgattacaccaactgccatgtccattacattgccacgtgaaataaactctttaaattctttaatcatgctctactcctatatctaatatatctaaaaaaatgcgattttaactaaagtatatagtagtggttatttatagtctatcaatttgcttttaaccgaagcgagcgataaattgaactttcttttctttatctaaaatattaatttcacattcggtggttcgaccagttgatttttgaaatgcttccgcgatcattccgccttcaagggagaattccttgctggcgctattcaaacgatcagtgacagtttggccacttaattcgtaagtagtaaatgatcgtctttctttaactttttctagcttaccaaattcagccatgttgaagaattcaactaaatcatcataatcacttaaatcatattttcgcgcgattctcttgccagcccaataaagaattgaggcgtcatcatcgcctaaaatagttggcaaaaggaaatcgcggtaaagttggttaataaaatatacgtgctcgtttgtgttttctgtgttttctgtcataaacttgttcatcccttttattcttttttattttaccgtaaactagtataagtagaaaataaatttttgattttaagagggttttattatggataatcgtccgattggattattggattcagggctaggtggcctatctgttgcaaaaaaagtaattgaaaaattgcctaatgaatcaactgtttttattggtgataacgctcatatgccgtatggcgatcgaactaaagaagagattattgaactagttagaaaatcagtccattttttgttagataaaaatgttaagctgataatttttgcctgcaatactgcgacagcaatggctatgagtacgattcaagcagaaatcgatccacaaattatcggagttattcagtcggggagtttggccgcttcacggacaactaagaataaaaaagttgcggtagtttcaactaaagcaacagcagaatcacatgcttatgctaaagagatccgtttccgtgatccagaaattcaggtaacggaattagctgctcctaaacttgcaccacttgtggaggctcaaaaagatcatgaaaccaacttaaaagtagttaaagagagtttgacccccttacaaggaaaagactttgacactttaattatgggctgtacgcattatccattgattcagaaagaatttaaagaagcaattaatgataaaaatgttactatcttggatcctgcagatcaagttgcacagtatacgtttaatgtgatgcggcgcgatggtttgtttagtgatggtaatgaaaaagtcagtcatgaatattacactacaggcgatccaactagttttgatcatttagcaaggacattcatggatgatgcaactttaacatctaagcatgtggatacggagaatgaataatggttaaagaaattttatttgcgactggtaatcaaggtaaagcaaaagaactaaaagaagcctttaaacaagctggggtagatatcgagattaagacgaatgctgacttagacaatccgcctcatccgattgaaagtggccatacgtttgaagctaatgccaagattaaggcccatgaattagctgagtttagcaagttgcctacgattgccgatgattcaggtttaatggttgatgccttaaatggggagcctggtgttagaagtgcacggtatgcaggcgaagctcacaatgacgcaaagaacaacgccaagttattagctgaattaggcggtgtaccggatgaaaaaagaacggctaaattttggactacgattgtagtttcgatgccaggtgaatttgataaagacttggttgtgtcaggtacttgcagtggtcgtattttggccgcaccacgtggtgaagatggttttgggtatgatccattgttttatattccagaaaaagaaaaaacttttgcacagatgactactgatgaaaagaatgagatttctcatcgtggtaatgcagtgcgaaaattgctccaagaattgccagcttggttagaacaatttgattaaggtaaaaatagctcagttcgggtcattcgtatgatttgaactgagttatttttagtgaaatgaggtggatatatatgtcaaaaagtattggggaagcgctgaaagaggaaagacggtctttaggattaacacaggaacaatttattaaagggattattagtgaatcgttttattcaaaagtaggacgaggtaagaatgaaatagtagcagtagatttactaaagattttagctgctaataacattagtgaagaagaatttttaaataaactaaatgttaaggaaaataataatttagaggaagacttaaaagttcaattacttaatgcatattctattcatgataaaaagaaaatcagtatgttagtcccaaaaatacaaaatgcagctatggatgaaaatactaaaatatcagctcgtttgattgatgcagttgtaaataataagattaatgatttaactcaaagagaaattacacaaattaagagaaaattttttgaagttgatgattggaccaaaaatattacaaccttacaacttttttgtaattcaatgcttttgtttgattttgatgagctggttctttttgtaaaaaaactggaaaaaacatgtaaagggaagttgatgaaattaccatttaatactcaaaagataattgcatcgatttgcataaattattttcataattgttatacaaatgattgtagtcgaaactgtcaaatcttttgtgtaaatagttctttctcgtaaattgattttttaattatttatttaatcaaagtaggattctaaggtgtcctgaacctgaccaaagcctttatgaattcgattgaaataacggtcattgtagctcattgcctgaataccaataaaagcatcaagcgactgttcagttggaaactctgccttaggcttagctttgcgcttgatcacattgttaaatgattcaatcatgttagtcgaataaattgaagctctgatctgcttgggatagttataaaagaccagcagatctggttctatgtctttcaagcttctgataacatggctgtaaaccttgccccatttggtatagaagtcatgcaggacagctgtggcttcttctttgtttgtctgttgatgcacctgtttgaattcgttcatgatcttttcacgatcgtcgacgcgtactttagcgcagatattgcgcatgacatgaaccaaacagcgttgaaaatgagctttaggataagtcctggccaaggctgttttcatgccaacaacaccatcagaaagaaagagttcaacttgcttcaagcctctggacttcatgttttgaagcatctctgtccagacttcaatgttctcactaggagcaatgcagtagtcaatgacttccttatgtccattaggtttaatgccaatggcaatatagactgcttcacgctcaaacgtttctcggcgcaaaggaaggtatgtcgcatccaaatagacgcagaaaaacttgtcgcttagcttgcgtttgtggtaagcctcaacctttggaatcatctgcttggaaatatttgatacctgagctggactgtaatggctgccatacatcttttcaattagatcggctatttccctggtggtcacgcccttggagtagagcttgataatcgtgctttccaaaacatcagagtgctgcttgtagtcaggcagcgtgtgctgatgaaattgaccgttgcgatcccgaggcacttgcacttcaattgggccaaattgcgtatcaactttgcggaaataagcaccatttctagagttgccagtattccagccatttctggcatagggatcatagcccagaaaggcagtcaattcagcttctagcaagttattaacagcctgttgtagttctttgcgcaataaatcatttattttgtctggattgaatagagcttgagcaaaatctttggtaaaatcattcatgaaggagttcttctttctgtatgtgtttttttgttcaaaccaatcatacgagaaaggaactcctttttctaatgtttaaagaaataaatttaaggaatcattcatccttacacaaactattttacagtctcaagatgcaagctatggttatgaaataatagaagaattagctaatattccggattttggaatatatgtgatagttactaatttttataaggcatattttcaaggcaataaaaagcaaagtcaacagatattagatttcttgaatcagaatggactaaacgaaatatctagcagattgccatagtcatatatgaagacttaattcaaatatgaagagtattagatttttttaatgtttatactataattttaataattaatgtaactcttaggattagcctaagggttattttagtaacaaaattatttatgtggagaaagaaaaatgagatcgcaatatttccaagccacttttcgaattgcacgtaagtcgaaaaagaatatgttgcttgctgttttattggtactttgcatgatttttgctgtactggttgtagaaaagcagaaaatcaacgatggctaccgtcaatggcgagactacaatgagtcagttcatgttaatgcagattatttttctagcaatttgctacgaaaaaaggattacaaacaaacttttaataatctgaataaacaggctgagtatttggccggtgtacaaaatggtgaagtatttgattcgcctcaagattatttgcaaaattccaaaaagttagtgcaaacgatgctggcgggttatcaaaataattatcgcggtgcttcaacgctaaatgttccaccgaagtatcaactgcaacaaaaattagtagtttatgattatttgtaccaacatcacttagcaattgtcatgaattctaaagaatctagcacctacttaatctatattttaggattagtcggcatgttcttatttttctacgttttatttattgctagtgatagctggatgattaatttatcacatccaactctgcttaaaaatattccttatcagattagggatgaagttgaaggcaaatttatcatcaatcttgctttgactttgcttccgttagtgattggtgtgttaggaagttacttatttgctggttttaagaatggctttaatagtttgaattatccagcagttttgtatttcggtaaaattagcgcggttccactgtggctttattgtttgttgtatttagtctatgcagttgtactagtgatgtttgtgactagcctggcattgttgcttaatcaattaactcatagcgtttatctaacgatttttattgcggcattggtctacagtatttcacttttaccgggtagcattgctaaatatcttttctttttaccttcagcttatctaaatatcagtaaggttttagatgggactgttgcaagtcaatcaattattccggcaaattgggcagttggtatgactattttactagtgtgggctgtagtgctggtaatctggttcaggcatttggttaaccaaggtggtgttgaaaaatgaaaaggcaatattttttatttcaattaaaaatatttttgactaatcctaaaaatgtggggctgtttttcattacggtcgtgcttgcactttactttggtttagtcagcgcaccgcagcatcatgtgattgaagatgttgatccatatgcaatttcaaaagaatatcaagatgatcaagcctttttaaaggtggctgaaaaagaatttgcacgggcagataaaggtacttcggattatgatcccagtgaaggtgctaaagatgctgttaccacatatccgaccatcattaagtatgaccatgagcgtttaaaagcacttaagaatcatgattggcgtttgtataccaaatacagtagcaagtggtatcagaaaatggataatttgatttgggttaaagaaaatcagaattacatgtatcccttggaatactaccacaataataattacaaagaagatggacattttgggtatcaaagaacatttcacttctatgatggtttacttaaaagtaaagcaaaattagacaaaaatgttttagaagaacggactactttacagagattacagcagtcgctttctgggtggacgatgattattttaattgtgattgttgttttgtttgcggcagatatgataaccaatgatcaaaaataccgtacagtagtgaagaatattcctctttctaaaaggacaattctttggctaaaaactgcggttattgaagtgggaattttatttaactttctagttgcttttttagtcgttacgttgtgtactgcgccaaggtatggttttggctcctttaatttattaacgccaatttatactggtcgtctgtatttcaaaacgccctttgtttatcagacgctgggacaatattatcttggtttcttgatctttgcagttgtaattacctttattttcattagattgactttattattgtcgctgatttttagaaatgaatatgtagcggctattatttcaagtgttttggcaatgagtgctaaagttctttatttttcattgggtatgggctttgtttatccatttttgaaacacttaccaatgacatattttacaatcggcgaaagtttgactagtaatttatcgtatttaatggactcaccaggttgggactttaatgatgggattattccgttagttacattagcaattgtaattgaattaactatttggctattttgtcagtttagaaaagtagtattagtgaagtaggtgaaaacatgttaaaaattcataatgttaaattagcttttggcgaacatgttgtcttagatgaaattagtttaaattttcaaataggaactatcgtaggtttagttgcaccaaatggtacaggaaaatccacactactaaacgtaattttacataatcttgagccacaagctggttatgtagaatatgatcatttacgttatcgcagcaatcgtgagattattaaactgcatcgactgatttgtgcttttcctgatcaaagtgatctgtttccatttatgagcggtagggatcatttaaagctttatgcggatctttggaaaaattcggataaaaatgtagataatattattaataaattacagatggaaaaatatgttgatcgcccaacacaaacttattctttggggatgaaacaacggctttgttttgccatggtggttgcagctgatacgccagtaatgcttttagatgaggtgatgaacggacttgatccccaaaacgtacaattgatttcagattacttattagatctaaaaaaagaaaataaattgattattatggcttcacatttgttaaataatctacaatcttacgcagatcgtgtacttttcttgaaggcaggaaaggtaattgaagatctcgataatcaacatcaggctaagcagtatctgaaaattgaggcgaatgcaatagccgggacgcggttaaaagataaaagatttactaagttacctgataataaaattattgtgccactggatgataatctaggattagatcaacttatacttaaattgactaaagagaagattccatattcagttggtcgaattgatttggcagaattatttagtaaattttatggctaaggcaatttgattagataaaaatagctcagttcgggtcattcgtatgatttgaactgagttactttttacttattttctgaaaattgaaagcaccaaaatcaagctcaagtcctgtcactattgagctttcttagacgtaattagtttttatatgatctgtttcagtgcaatttgtatgaatcgtggcagttggttaataaagtcattgattacttcatctatcttttcaaaactattctgtttaagctcttttaattctgaaattaagtagaccaatgcatctacgaatctaatatcaggtaaggattcgttcattagatagaataaatctccgattgtcttatcatctgtattttgtctttcctgccaggtcaatagatcataagttattgctgtaactgcgatatagccacattggccatcatagctttgaacttgagatttatctaaagcaagatattgcttagacgtcttaaaatatgtttcaatttgccatctacgaccataaagttggatgatttcttcagggctaagctttgtctgagtagtagctaaaaccaaatacttgttcttgtttccacggttggagacaaagacgagctttaataaaaagctatgtccatgatattgagcctcaactatgcttgaataaagataatgtttctttttacggatgtttgaagcagccaaacgatcatacaagtctttaacgctatagcggcgatggcgataaatgtaataaatctttgaactcttcttgatcatgccaagtccatctaaaccgatcttctttaaaatccaaaacattcttggagaagaaaaccaagaatcgaataagacgtatttagcttctactcctaatcgtaaggcttgtctaatcaactctacagttacatcattcatctttctctgagcttgatttctccttttaccagaaattgaacgttcatcagcagtaatgggagcagctccaatcatatttttcttggttttggttgacatcaaggcaaagttaaccggcaagaaggtattgccatcgctccagcctaaagttaaaccacgatatccgttcaaatactcatgcttgtcatggtcatagactttagctagcaattcggtctttttagaaaaagaccgagccatcagcgtatcgtcaacgataaaagcaagtcggcgtcttttatcgataaatggttttaagcagccaatgagccgggctgcaatcaagcataatagtttttgccagttgattcttccatcgttaagtacattgcgagcagttctaacggaaaaacgtttgtcatccttagctctgaataaagaaagccgagcaaaatgtactgacatcagccaagagataatcatggttaatgaaacggtggatttacgcttaaaattgacttgtttagttaacttagctagaccaattagattaataaatgaagaaattaaggatttagtatcattttctgtgtcgatttgttctatactgttcattgcgcaggatctcctttactttttaggtcgacacttaaagtataacgcagagagagcctgcgtttttatttttgataagaaaaagccaagaggcgcggggaaggagcgttaatcttagctttcaagtttcagttattttgcagtagtttttgcaggtcgttctgtacttgcaaaagcaatattattttctcgtaaaatttgaatatattgggtcaaatacaaatttttcacagcagattgtttaccaggcttaacttgaaaatgaatggaataaacaaattttttccctgtttgttcggtcacaccgacaatagtaggacctgatacaattgtctttttctcaggctggatcttacgattgcattctttgattaacttgttaacttcatcaatatcgtttttggtatcaagatccaaattaatgtctagtgctacaccgccatgggctaggttttgcacaatggtaatgttgcggttagggatgaaaataattgagccatctgaacccttgagacgagtagttctgaggcctagttgcacgacggtaccaacattagtgccaatctgaactaaatctccaacatcaaattggtcttcacttagaataaagaaaccgttgaccaaatcactaacaaagccttgtgcgcccattcctaaagctagggaaaaaattccagcactggctaacaaggtgccaactggtacacctagaatagagagaataccgaataaatagaagaagataagggtatattgaaaaacgctgttaatcaaagctgtgatagttcgagttcttttattcttaactgtgttatgcttggctaagtaattattaattattttatgaccaaaatgggataaaaggtaaaaaatgagtgaagtaatagctaattgccaaataattgacaataaattttggctaattttactccaatcaatttcaattttctgtatatttatgtgagtaggaatcttcatttggtgtcctttctattgcttacgggtataattaagaataacaagacattaattgagaataaaggatattcatgctaaactttttttagatgttgatggaggtagaaaatgacaatttcttatggtgctttagcaggcttaattgcggcgattgcattcttaattttagtattatttacgattccaatgctaattcggaccgcgaagttgttgaaagaaactagtgcaactattcaaacaactaacgagtcaatgaagaaaatttctgaagatatggatggcttgatggatcaaacttcggatttgttagataaaactaatgacctaatgaccgatgttaatggtaaaatgaagacgttagatccagttgttaaagctgctgcagatttaggcgaaagcgtatcagaattaaacgattcatctaaaaagatcgctaaacgctttagcagcaatcatttaagccgtacgggtcttatttcttcaatagctgcgacggcatttgcaagacgcaagcgtcgcagaggtgaaaattaataaaggaggaattcaccatgaaaaaattcgcaagtttcttattaggtgccgttgcaggatgtgcagcaggttttctcgcaggttcacttcttgttagtgatgaacaagttgatgacgttaagaacaagattaaagataatgacaagcttcaagatttgaagaagaaatacgataatggtactgaaatcgttaagaatcaattagcatcattccctaagaatgttgaagatgattcagaattgaaggattttgacgacatcgtaatcgatgactcaaataaagatgacgatgacagtgaaaatgctgaagagtcagttaacgatttgaacaatgctgaaaaagatgatactgatgcagcatctacttcagaaaaaccacaagcttaattaaagtcaaaaagaaaaggagctggtcgtgatgatcaatgtcattaagttaagacattgacaaattatcgacttggacttttaagatcattcatttgcgatttatcgcatttgaatgctcttttttcatgccaaataaacccaaatcttgtttagaaattaggctacacgatataaataatatacagctgatttgggtttgagatttcttttgtcttttcgtcctggtctgatcggaattgtgtaatgactaatttgaataagaatctttttaaagatttcagttgaagaagaaattatatacatagcctggatgacaaaacatgactgtttgaaattgatcgcatattgatacttgcattttttttgtggtacatatgcttgagcatcaatttgactgactgcgttaaacataatcatgtgggcatagatctccatttcaataaatctatcctgcttggaatgaaactgtacgctacctaaagcatatttcaactttttgaatgaagtttcaatgccccagcgcaaatggtagatttctttgatcctttttaagggataatcggctctatttagattagttagaacaacttcccattcttctttgcctgatttaggatcattaattctaaatttacaggcacgaaattttattgtacataactctccaaagtcccagctgccatctttggtatttttagaccgatattttatatattgacggtaatgatggttaaccaaatgaacgttttctgtagccttatgggtttcataataataattagaggtagtcacccagcaagctatatccttatcacactcttgattaggcaactcagctacttccttaaatgcgccatatcccgttttagtacgtatgacataataacagttaggcaggcgattacaattttcaatcatgttaaagccggtataacctcgatccatagtaactatatatggtccgcaatttagctttttaagcatttgaacggcggctttacgttcatccatctttgacttaggctgaaagatgcagtcttgataagtattatttaacaggtcatagagtgcattaacatgaatttggcaatatggctttcctttatgattgagatttccaacgatattctctgatttaggattccagatttgattaaaatcagacccatcaatggcaaatatacgatatttatgatcaaataactggatattaaataaattctgattaaatacagttagaatatgcttaaaacatgcgggtgaaagctgacctttgcgttggacataagcggaagtactgactactttatcgttatttttaatagctttttggccaaaagctctaaacaactcactggtcaaatcttttccttgcatattaatagtagttttaatgactgtagctgcatctaaaaaccgcttcctagtgaaggcatgaggatcatcgataaaatcatgaatatgctttccagtatcattgataatttgatcaagacgatctaaaatatttctgtgaagggctttcataattaacaccagctttctggcaataattttgaaggtttaataatttaatcagagggcgaaaaggtaggttcttttcgcctttattttatgcaaaaaaagaaccaaatcataatgattcggttctacagagattagattcaatttgtcaatgtcttaacttaatgacattgtcgtgatgatcagctccttttttatgactaaaattagtctttaagtggtaaaacttttaagtctttgtcagtgtgagtaaaggtttcaaagccgtccttagtaacgacaccacaatcttcaattctgacaccagcaaagccagggatgtagatacctggttcaatggagaagcacattccttcttcaagaactaagtcgttaccttgtacgattgatggatattcatgaacgtttttaccaatgccgtgacctaggcggtgaatgaagtattcaccatagccagccttagtaatgatgtcacgagccacgctatctaattcttcagcggtgattcctggcttagcagcttcgattgcggcttgttgagcttcacgatcaacttcataaatttcgcgttgcttagcagtaggttcaccgtaagcaacagttcgactagaatctgatgcgtaaccatcgtgcatggtacctaagtcgaataaaactaattcatttggttgaacagtgttcatagttggaccaaggtgaggattagcggcgtttttaccagcttgtacgatggtttcaaaactttcatgcataacacctttttgaatttttagttggtaatcaatttgaccagcgatgcttctttcggtgacgccagttctaattgcgtcaaagccaatcttaaaagcgaagtctgcttctgcaccagcgccttgcaacttcttgatttcttcaggtgtcttgtaaagacgaattttttcaataaaaggtgaaacatcattagtaaaactagcgttaggaaattcaccacgtaagagttggtagtgggcaacagacaaatcatctttttcaattgccaaattatgggtatcgtgagttctctttttgacattagttgcgatgatgctccaaggattctcggaatcaagatagccgataacatcgccatcccatgcagatgcttttgcttcttctacgtttaaagctgggcagaaaataaatggttccgcatcttttaaaacaattaaagcaaagattctctcatgtggttccattgagtaaccagtaaagtaggaaatggtgattggattagaaatgtaagcaagatcattattggagtcttgcaaccattgttgtaatttatctaagttcatattgtcctcttttcttgcaaattatgtttactgtagtatatcatgatctcttaatgaaaaaatgaaagaaaagctgtaaacgtttgcattttatgcagcatcgtgatatctttaagtgaaggattttttggaaggactgagagataagagatgcataaacaagaagttacaatctatgacgtcgctcgggaagctaaggtttcaatggctacggtttctcgtgttgtgaatggtaatagtaatgttagaaaagagacacgtgaccgtgttctcgaagttattaaaagactgcactatcaaccaaacgctgtagctcaaggtttagcttctaagcggactactacagtagggttaattgtcccagatttaactaatttatactttgcagaattatctaagggtattgatgatattgcacttttatataaatacaacatcattattactagtattgaaaaccgcttgatgaaggaagaccaagttattcaaagtttgctgaataagcaagttgacggtgtaatttatatgtctaaccgtttatcagatgcagcagctgatgcctttaagcggactgatactcctgtggttttagcaggtactaaagacaatcgtgatgattttgcttctgtcacaattgactataagaaggctgatactgaagcattaaatttgatgtaccatgatggtaagaagcatttgggaatcgtagttggtgatcaagatgctgtagttaacagcgaaaacagaatccctgcttatgaagaattcatggaagaaaatgatttgggcactcctcgaatctatactgatattaaagactattcagatggttataatttatacccacaattagttaaagatggcgttgatggtgtaattgttactcgcgatatttcatcagttggtattttgaattctgcgatggatgcaggtaagaaagtgccagaagatttggaaatcgtgaccgccagtgctacgcagttagcttctgttgttcgtccagctttgactacgattaagcagccactttatgatatgggtgccgtagcaatgagaatgttgactaagttgatgaacaatgaagaagtagatgatactcatattgttttgccatatgaattagttaaaaagcaaagtactttaaatcaataattaagtgaagcaaaaaagaccagtttactggtctttttgttttagtagataattttgttaatctgttgaagcttttgtgtaaaagtggttggtgcaattgcttgattaggattatagggcaaaagcacgagattagtgtactgactgacccgtggtaaggactgataatctctgaaatcgtcttgactaaagaagccatagaacaagatatcttttgccttaacccaacctagtttggtataaatccacatgtttttaggactaccattaaaattttgaatttttaataattgatttgcgggtaatttttgctgcgttttggcttggttatcaggataacgataaattgtaactttttggttaggtttagcgataattttcttattttgataaggagcaatatctcgctttgttaagtcaaaattaacgaattctgccgaaataaaagttttttcagcaatttgataaaataagcgatcatctacacggacgccataagtgacattgactttttgacctggttgcacgtacttcttttctttgatgcgaacatacggattcatcattgtagcggctttagttttaccaaaataaattccagttctattaatagcgtactttttagtgccacttttggctaatttatatttaaaaccagtagcgggatagttggtaaccacgccatcaacattccgattaattagccaatgccatagggcaggcgattcgtccatttcggcccagacaaacagttgcttatgtaatttgtgaagccagtgaattaaaaagggatgctcttgcacaatgtcagaagaagcattgatagcattaacttgaggtaaattactgaaattaatgcgtttcaggctaccaacgatcaaaattagataagcttcaggcataatttttctaaagtgaaagagactagcagcggaaaatgaatgaatcatgattcttttctgcatatggtattttttaactatttgtgcgattttatcctctaactcataggacggatttaatccatgatcaattttagtctctaagacaaatttagtgtttggtttattttgataatgcttaaaaagctcactgagtgacataacgtgttcgccattgtcatattgcagttgtttaagtgctgtaaaattattttgtgatacaattgcatgtgtatgagtaactcggaagaggtcatcatcatgtgcaatgaccggaactccatcctttgagagctggagatcgagttcaacgtaatcagcaccagaattaaaggcggaatcgtcagcctgaattgtttcttcaggatatttgatgggatcaccacggtgccctacaactgtaaaaccactatttatgaaaaagactaagctaaaaaaaagaacccaaacgagtcggcttttaaatttcatgtgtacacctctatcgcatacttaacaatagcatggttacacatttttttctatttatagtactattcttttatcagtaatcggtatgattgaaatctaaaggatgagatttaatggaacaattggacttaattgaagaagttaccagaaatgatggcagtcgatattatgaaatctctaatattgaccaaaatggaattgcagaattagctgcagatcatggcttaattaaaaaagtcaaaatactgcagctgaatattcctcgaactaaggcactgattgcttatgaaaaatatatcaatgatacttatgacttgcagactttgactaatgaaagtgattggaaaaatccaaaatgggtagaatgggataaacctaagggaaaaattttagacgcatataatatgatcttaaaagccaatcgaattggttagaaagtggcataaaaaatggaacaactgcgaattttacataccaatgatcttcattcacattttgaacatttccctaaaatcggacgttacttgaaaaaagcgcaggctgatcaatcggttgatggtatctacacttttgatgcaggagactttatggatcggtctcatcctttaactgatgctacggaaggtcaagccaacatcaaattgatgaatgggtttaactatgatgcaattacgattggcaataatgagggaatttctaatccacattgggtattggaacatttatttgatcatgcggactttccgacagttttagcaaatttgcgtgaagaagatgaatcaatgcctaaatgggcagtcggccatatgtttttaactactaagaaaaagacgcgaattgctttaattggcctgactgcagcttatccaatgacttatggtcctaatcattggcatgtcaagatgttaggtgacagtatggatcacgaattagctcaaattgaaggaaagtatgatgtcttaattttattgactcatgttggattaaaaatggatcgctggttagctaaacattatcctcaaattaatttaattgtaggaggccacagccatgatctgattgaacatggtgaaaaagtggggcatacttggattacgcaaacaggtaaatggggaaactatgtgggtgatattcatctagaacttgaagatcatcacgtgattaaggtagtacctcgcactatttctactgcttcgatgccagaagaaccggaagataaggcagtgattcagggctactatgatgaaggtaagcgacttttatcagaacgaaaagtggctaatttacctgaaaaatttgcggatgataaagtagcagccgttcaagtttctcttgatgcgattgctgattttgctaaaacagatttagccattttaagctcaggcctattcttgcccccgtttaagagtggaataattactcaatatgatttacaaaatgccttaccgcatccaatgcacgttgttcgttcaaccttgaaaggttatgatttgtggcgactagtgatggaaattgaaaagaatcggcattacctagaccattttccactgcaagggatgagttttcgaggaaaaatttttggtcagatgtattacaaagggatcaaggttgatatgcgtagacgtgtagtttacgtcaatgggcatgaaattgatccacaaaaagaatataaaattgcctgtttggatcattatgtcttagttccattttttccaactttggctattgtcggtgaaaatgagtttttattcccacaatttttacgtgaagttgttggtaaatatttggctgaaaaatatcctttaacagcgagaagtgaaaaagatgactgaagaaaataaatttgaacaagaacagccaattagacacccacttgctgacgtggtgcaagatggtaagagcattaagattggtgcgcagctttatagcatcattgtcaatgagcgagacgcacttgatttagaatctttgcgtaaaaaatatgatccttatcttgaccagtatgattatctggtgggggacgtttctagtgaacatttacgcttgaaaggcttttataaagacggtgctagaaccgcaattgataaaaaagaaatggcgatcgtggattatttaacggaatattgtaatcccggcggaccttattttatcttggaattaacgcatccagtacattattatcagcatcaacgtactaaaatacggcgatcacgtgaacgacgcgagcgcgattttggtaaaaatgagcgttatcatgtacgacgtcgaaattatcggaagaataaaaatgaaaataatccgtttaagaagcggcgtgttcatcaaactaaatttaagaaaaaaacaatcaattgcagtgaaaaaagaatttggacggcatcattcatttattattaaaaagagaaagggaaactagtgaaagattaccgggtatttttaattgacttagacggaactgtttatcgtggtaaggaaacagttgaatcaggagtaagatttgttcatcgtttggttcaagcagggaaagactatttgtttttaaccaacaatacgaccagaacaccgcaaatggtagttgataaactaaagggacacggtatcgaaactgatacggaccatgtttatacgccaagtatggccacagctagctatattttacaaagagaacacaaggaaaagatcggcttgtatattattgggcagattggtctctggcatgaattattgcaacatccagagtttgagcttaatgaagaaaatcccgattatgtaattgtcggtatggatacagatctgacttatcataaagtacgagtagcttcacgggcgattagacgtggagccacttttattgggactaatgccgatatgaatttaccagcagaggatgagctaattccaggcaatggttcacaatgtgcattcgttgctgcagcaagtggagtagagccactgtatattggtaagcctgaatcaattattgtaaaaatggctttggataaagttggctatagcaaagatgaggcacttttggtaggtgataattacgataccgatattaaagctggctttaatagtggagtagatcagttgttgactttgacaggtgtgacgaccaaagtggatattgcagataaacgtcaaccaacaattttagttaataacctagatgaatttgaattatgattactaaaaacaatattttttcgctgatttatcattttttgtttgctgtttctagcagtgtaattggggcaattgtggctagttggccattattgtttatttttatgatcgtacaaaagacatatgagacggttcacatgtctttgtttaaggtaatgcataattataaccagctgatgttttatttgctctggccctttaaaaagcagcttaaaatggataatttccctacatctgctaatgcggcagaacattttgcggaatgtaagcatttatttattctgactctattagtttttattatctgcatcatagtgcactttgtttttaaacgacaaaagaaaaagctactgcttaatttggataaatcagtagcccttattttgctattattgccaattattatttttccatttgcagtaaccaatttcgacagtttctttgtgatttttcaccatattttgtttaacaatagtgattggctgtttgatcctaatactgacccaattatcaatgtgctaacggaaggcttctttgcttcttgttttgccgttgctggggttatttatgaattatattttgctgaaaaattattacgtaagtaaaaaagagttccttagtggaactcttttttgagtgatatttttttcttgattgcgacaattgcgattggcacaactgatactaaaatgatagcaattacgatcattgaaaaatggtcctttacaaatggaatattgccaaagaagaaaccgatgattgtgaacaatcctgtccaaagcaagccacccaagatgttgtaggtgataaatttaccataatgcatcttactgccgccggaaatgaatgggacaaaagtacgaataaatggtataaatctacctataacgatcgtaattggtccgtggcgctcaaagaacttttcagcggccaaccgattattttgattaattaatttattgaaccagctatgtttttcaccagctctggttgaccaggcaccaatttcatagttgatactgtcaccgattatggcggcgaatgctactataagataaactagccaaatatttaagccatacttaggattagcagccattgcactcgcagcaaaaatcaacgaatcgcctggaagaaatggaaaaacgactaagcctgtttcaataaaaatgatagcgaataagattaaataggaccaaccaccgaattggttaacaatcgggattaaatggtcatcaatgtgcaaaataaaatcgattaaactcatctggaactcctaaaaactagttgaatgaattgtcaaagttttttcagggaaaagatcacgcataatcgcggtgattgcaatctgggcttcgccaaaaccgagagcgattaaagggacgcgtccaagataggtaacaacatcgccagctgcataaacaccggcgatattagtttgcattgttgaattcaccttaatttgtgcgccagctaaatcgattccccattttttgacaaagcgattattagctttaaagccatatgcaacgactgcttggtctaacttgatattagttaagctatcttttcccatttcttttaaattaacgttcagttgattatcaaccaaattgatttgtttaggaagataaggagttaaaatttcaacattttttaaagacttaagttttttgacattagattcaagaccgcgaaattgattacggcgatgaatgattttgacattggcataattagctaattctagtgccaggtctaatgctgaatcgccgccaccaaagacgccaactgtttgtccgacaaattttgggggatctttaataaagtaatgaatccttttttgagtatcatcatccatagataatggtaaagctttaggtttaaaggcaccggcaccagtggtaatcaatatgctgcgggatgcaactatatcatcgataataaagccgtctttttgtttagtgacattttcaactttatggttagtaaaaatagttgtatccgttaaattatgtcgtaaattgtcgattagttcagttcctgtaatagagtcgtaagcaggaatatctttgattttcttaaaaggataaagcatttgtggctgtccgcctgtttcagataatgaatcaaacagtacggtcttgagtccatgaagatgggcaaatcgcgcggcaaataggccaacaggtccgccaccgataatagttaaatcaaattttttaattttaatgacctcctcaaagtagtgatgtatcaactttaacatgaattttgtaaatattcatttaaaaataagcttgtcaaaaaatgaattttaaggtatattattgaagtcgcctttttaagagcgagcataattctttattgaaaaaatacttgcaattaatattcaagtattatacattaataaagtcgcttcgagagatgcgacgagagcttaaaaacagacatgcaaggaaagaaaacaaataaaaagaaaaaagtacttgcaaagaagtaaataagctggtaatatatttaaatgtcgtcaggtgaaagcagaaaaagcttgagtaagacaaaaaaacaaatcaaaaaagttcttgacaaagaaatgatggtttgataaaatataaaagctgtctgctttgcaaaaaaagcaagacagaggtagtactttgaaaactgaacaaagtttcgctaaaagtgtgcgggtgtaaaaacccaaacaagaagcgaagtcaattcgcaagcaataaatttgagacaaagatcttaaataaggaatgagcaatcattcaaactttttaaaatgagagtttgatcctggctcaggacgaacgctggcggcgtgcctaatacatgcaagtcgagcgagcggaactaacagatttacctcggtaatgacgttaggaaagcgagcggcggatgggtgagtaacacgtggggaacctgccccatagtctgggataccacttggaaacaggtgctaataccggataagaaagcagatcgcatgatcagcttttaaaaggcggcgtaagctgtcgctatgggatggccccgcggtgcattagctagttggtaaggtaaaggcttaccaaggcgatgatgcatagccgagttgagagactgatcggccacattgggactgagacacggcccaaactcctacgggaggcagcagtagggaatcttccacaatggacgcaagtctgatggagcaacgccgcgtgagtgaagaaggttttcggatcgtaaagctctgttgttggtgaagaaggatagaggtagtaactggcctttatttgacggtaatcaaccagaaagtcacggctaactacgtgccagcagccgcggtaatacgtaggtggcaagcgttgtccggatttattgggcgtaaagcgagcgcaggcggaagaataagtctgatgtgaaagccctcggcttaaccgaggaactgcatcggaaactgtttttcttgagtgcagaagaggagagtggaactccatgtgtagcggtggaatgcgtagatatatggaagaacaccagtggcgaaggcggctctctggtctgcaactgacgctgaggctcgaaagcatgggtagcgaacaggattagataccctggtagtccatgccgtaaacgatgagtgctaagtgttgggaggtttccgcctctcagtgctgcagctaacgcattaagcactccgcctggggagtacgaccgcaaggttgaaactcaaaggaattgacgggggcccgcacaagcggtggagcatgtggtttaattcgaagcaacgcgaagaaccttaccaggtcttgacatctagtgccatttgtagagatacaaagttcccttcggggacgctaagacaggtggtgcatggctgtcgtcagctcgtgtcgtgagatgttgggttaagtcccgcaacgagcgcaacccttgttattagttgccagcattaagttgggcactctaatgagactgccggtgacaaaccggaggaaggtggggatgacgtcaagtcatcatgccccttatgacctgggctacacacgtgctacaatgggcagtacaacgagaagcgagcctgcgaaggcaagcgaatctctgaaagctgttctcagttcggactgcagtctgcaactcgactgcacgaagctggaatcgctagtaatcgcggatcagcacgccgcggtgaatacgttcccgggccttgtacacaccgcccgtcacaccatgggagtctgcaatgcccaaagccggtggcctaaccttcgggaaggagccgtctaaggcagggcagatgactggggtgaagtcgtaacaaggtagccgtaggagaacctgcggctggatcacctcctttctaaggaagcgaaggatatggagagcaggaatgctaagagaagtatccagagcaagcggaagcacactgagaaactttgtttagttttgagggtagtacctcaaagatttgaaaaacgccaagcgttagtcgggcctatagctcagctggtttagagcgcacgcctgataagcgtgaggtcgatggttcaagtccatttaggcccattgacataacgaagaaaaagagttaaagttatgtctggccgaaaataaaatactctgggggcttagctcagttgggagagcacctgctttgcacgcaggaggtcatcggttcgaacccgttagcctccattgatccagaaaaaggatcaaagagctagtacattgaaaactgaatataatccaagcaaaaaaccgagacaatcaaagagaacagattgtagagcgaccgagaagagaattcttgagtaaggtcaagtagaaaagggcgcacggtgaatgcctaggcactaacagccgaagaaggacgtgacgaactacgaaaagcttcggggagcggtaagtacgcagtgatccggagatatccgaatgggggaacccaatgcagagatgcattattgattagtgaatagatagctaatcaaaggaagacgcagtgaactgaaacatctaagtagctgcaggaagagaaagaaagatcgatttccttagtagcggcgagcgaagaggaaagagcccaaaccaagtgatttatcatttggggttgtaggactgcgacgtggcagtgtaagagatagttgaattatctgggaaggtaagccagagagggtgagagccccgtaagcgaaatctcaagcacgcctagcagaatcctgagtaggccgggacacgaggaatcccggttgaaaccgcgaggaccatctcgcaaggctaaatactagttagtgaccgatagtgaaccagtaccgtgagggaaaggtgaaaagaaccccggaaggggagtgaaaaagaacctgaaaccgtgtgtctacaagtagtcaaagcacattaaagtgcaatggcgtgccttttgtagaatgaaccggcgagttacgttatctagcgaggttaagtcagaaaagacggagccggagcgaaagcgagtcttaatagggcgaaaagttaggtgacgtagacccgaaaccaagtgacctacccatgaccaggctgaaggtgtggtaaaacgcactggagggccgaacccacgtaagttaaaaattgcggggatgagttgtgggtagcggtgaaattccaaacgaacttggagatagctggttctctccgaaatagctttagggctagcctcgtggagaggataatggaggtagagctctgtttggactaggggcccgtcaggggttactgaatccagataaactacgaattccagatatccatacacgggagtcagactgcgagtgataagatccgtagtcgaaagggaaacagcccagatcaccagttaaggtccccaaatctatgctaagtggaaaaggatgtggagttgcgtagacaactaggacgttggctcagaagcagccatcattcaaagagtgcgtaatagctcactagtcgagtggcgctgcgccgaaaatttaccggggctaagcatagtaccgaaactgtggatgtgttttaaagagcacgtggtaggagagcgttctaagagcggagaagttgaatcgagaggatcaatggagcgcttagaagtgagaatgccggtatgagtagcgaaagataggtgagaatcctatccgccgaaagactaaggtttcctggggcaggctcgtccgcccagggtaagtcgggacctaaggcaaggccgagaggcgtagtcgatggataacaggtagagattcctgtactgtgtcaaatcgttaagagcgaaggagggacgcaggaggtgaagcacgcatcgcgatggaacgatgttcaagcaacaagtgcggttaagagtcaaatgcttctaaccagcaacacgagttgtgaagaggagtgaattaaaagtagcgaaggtgtggtaatcacactgccaagaaaagcttctagccagagatgacatacccgtaccgcaaaccgacacaggtagtcgagtggagaacactaaggtgagcgagagaactctcgttaaggaactcggcaaaatgaccccgtaacttcggaagaaggggtgctagccaagagattggttagccgcagtgaataggcccaaacaactgtttatcaaaaacacaggtctctgcaaaatcgtaagatgacgtatagaggctgacacctgcccggtgctggaaggttaagaggagagcttagcgtaagcgaaggtttgaattgaagccccagtaaacggcggccgtaactataacggtcctaaggtagcgaaattccttgtcgggtaagttccgacctgcacgaaaggtgtaatgatttgggcactgtctcaacgagagactcggtgaaattataatacccgtgaagatgcgggttacccgcgacaggacggaaagaccccatggagcttcactgtaggcttgatattgagtatcttttaaacatgtacaggataggtaggagccagagaagataggacgctagtcttattggaggcaatgttgggatactacccttgtttgaaggatgctctaacctcgacctgtaagccaggccagggacagtgtcaggtgggcagtttgactggggcggtcgcctcctaaagtgtaacggaggcgctcaaaggttccctcagaatggttggaaatcattcgcagagtgtaaaggtataagggagcttgactgcgagagagacaactcgagcaggtaggaaactaggacttagtgatctggtggtaccgtatggaagggccatcactcaacggataaaagctaccctggggataacaggcttatctcccccaagagttcacatcgacggggaggtttggcacctcgatgtcggctcgtcgcatcctggggctgaagtcggtcccaagggttgggctgttcgcccattaaagcggcacgcgagctgggttcagaacgtcgtgagacagttcggtccctatccgtcgtgggcgtaggaaatttgagaggagctgtccttagtacgagaggaccgggatggacgcaccgctggtgtaccagttgttccgccaggagcatcgctgggtagctatgtgcggaagggataagcgctgaaagcatctaagtgcgaagcccccctcaagatgagatttcctttgcgtaagcagtaagacacctcagagacgatgaggtagataggctgggagtggaagtcctgtgaaggatggagcggaccagtactaatcagtcgaggacttgaccaaagcgaagcaaactggaaggttttttgcgagaaggattatgtttagttttgagtgtaaaagctcaaaagagtacggtggcgaaagcaagaaggatacacctgttcccatgccgaacacagaagttaagcttcttaacgccgaaagtagttggtgggcaactgcctgcgaggaaaggaagctgccgtgctcaatatggaggattagctcagctgggagagcatctgccttacaagcaggaggtcacaggttcgagccctgtatcctccatatcgagtcgttagctcagttggtagagcaacggacttttaatccgtgggtcgagggttcaagtccctcacggctcatgaccctatatatgcgggtgtggcggaattggcagacgcgctagatttaggttctagtgttttcggacgtgtgggttcaagtcccaccacccgtattgccaaccacatattgacaatatgccgatttagctcagttggtagagcatctgtcttgtaaacagggggtcgtacgttcaagtcgtataatcggcatttatattacgcggaagtagttcagtggtagaacatcaccttgccatggtgggggtcgcgggttcgaatcccgtcttccgctttcatcaacacgccggagtggcggaattggtagacgcacgggacttaaaatcccgcggttggtttcaaccgtatcggttcgactccgatccccggcattgatgatgcgcccttagcgcaactggatagagtgtctgactacgaatcagaaggttgaaggttcaaatccttcagggcgcatataacgggaaatggctcagtttggtagagcacctggtttgggaccagggggtcgcaggttcgaatcctgttttcccgattgtaatctaatggtgattggttacattttggcggtgtagctcagctggctagagcgtccggttcatacccgggaggtcgagggttcgatcccccccgccgctataattgtaagcttggacctttagctcagttggttagagcagacggctcataaccgtcctgtcgtaggttcgagtcctacaaggtccataatatggcttttatattaatatcgcgggatggagcagtctggtagctcgtcgggctcataacccgaaggtcgttggttcaaatccagctcccgcaatttggtccattggagcagtggtttatctcgcctccctgtcacggaggagatcatgggttcaaatcccatatggaccgtaagatggctcggtagctcagtcggtagagcaaaggattgaagctccttgtgtcggcggttcgattccgtcccgcgccatttcattttatattaggtgcgggtatagtttagtggtaaaacgaaagccttccaagctttagtcgcgagtccgattctcgttacccgctttatatgggcctatagctcagctggtttagagcgcacgcctgataagcgtgaggtcgatggttcaagtccatttaggcccattggagacatactcaagtggctgaagaggcgcccctgctaagggtgtagatcgggttattccggtgcgagggttcgaatctctctgtctccgctatatagaaaagtaactgttctagattaatttctagagcagtttttttgtgtaccgagcggcattcttagtccgatgaaagtgttagaactaagagccagtagcaatgatattatgagtatgggacgtttacaaaggagtaaatacctgctgaaacagtaaggaattacaaatgtatcgtcttatatgcaaccatatgtatagtggatggaaggagatgagttcgttaagttctctctgcattgaaaacacgtcataagatgttaaaaccttaattttgagttattgataaacctaaatgcatattattttgaatgacttaatggaaattattacacttcttttaggtaaaagtcttggacattgattcaagtcaataatcgtgtatataacatagggagagccgattgttttaaatttcttcttgtatgatctatattaaaaaaataattttgtgggggatttcatagtgatataaagaagcagtttaatatggaacaatttataaagatcatttagttaaagataagagaagctgttttgctctagctaatttgaagtattaagatagatataaatgttttacaacaaaaaaataaaaaagtacttgcattttgactgaatatctattaatattaaatacgttgtgattgagagatcacaatagtaatagctaattaaaaaaataaataaaaagttcttgacttttgaaatgtgattagttattataataaagtgctcttgagtgagttacatgacccgttggtcaagtggttaagacacggccctttcacggccgtaacatgggttcaaatcccgtacgggtcattgccacaatttatttttttggcattaagcaatggaggattacccaagtggcttaaggggacggttttgaaaaccgttaggcggttctgccgcgcgtgggttcaaatcccacatcctccttagttgaatatcgcgggatggagcagtctggtagctcgtcgggctcataacccgaaggtcgttggttcaaatccagctcccgcaatttggtccattggagcagtggtttatctcgcctccctgtcacggaggagatcatgggttcaaatcccatatggaccgtaagatggctcggtagctcagttggtagagcaaaggattgaagctccttgtgtcggcggttcgattccgtcccgcgccatcatctggaggagtagcgaagtggctaaacgcggcggtctgtaaaaccgctctctctgagttcggcggttcgaatccaccctcctccataatagggatatcgtataaaggtagtacatcggtctccaaaaccgctagtgtgggttcaattcctactatccctgtttaccttcatggcggaattggtgaaggggttaacacactggtttgtggatccagcatgcgtgggttcgattcccacattccgccctagtattgggatatagccaagtggtaaggcattagactttgactctaacatgcgctggttcgaatccagctatcccaattctaaataatttcataacttatggcggtgtagccaagtggtaaggcagaggtctgcaaaaccttaatcgtcggttcaaatccgacctccgccttatcaaccgaataagttgattattttaaaatttaatattatggcggtgtggcggaattggcagacgcgtcagactcaaaatctggtgtccattacggacgtatcggttcgaccccgatcaccgctattattatgaagcgatccaattattggatcgctttttttttattttaaaatgttagcattttattatataaattgcacatgaatacaggaatctttataatgctacatatggaggtactcaaatgaatattggtctttataccgatacatattttccccagataagtggcgtagctacttcaattaaaacgttaaaagaagcgttggaaaagcaggggcataatgtatttatttttactactactgatccgaacgtgaaaaaaggaactgtagaaccgaatgtatttcgttttagcagtattccttttgtctcatttaccgatcggcgaatagcatttagaggactatttgaagcaaccaaagtagctaaagaagtcaatcttgatatagttcatactcaaactgaatttgcattaggtactattggcaaatatgtagctcatcaattagatattcctgctatccacacttaccatacgatgtatgaagattacttgcactatattttaaatgggcatttgcttcgtccatatcatgttagacaatttgttaaaagctatttgaaaaatatggatggatgtattgctcctagtggccgagttgaagaattattacggcgctatggcgttcaaataccaattagggtgattcctactggagtagatttgcagggcatgaacaacgatattcaacgtgatgtgcggcaagaacttggaattgatcaagatgcgcctgtaattttaaccttaagtagaattgcagccgaaaaaaagattaatcatattttgaacgtaatgcctgaaattattgatgaatttcctaatgtgaaatttgttatcgcaggtgatggccctgatgttgatgtgttaaaggatcaggtagagcgattaacactagagaattacgttatttttgtcggtaatgtagagcatggcgatgttggtaattattatcgaatggctgatctttttgtttcagctagtgatacagaaacacaggggttgacttatattgaggctctagctgcaggtacgccatgtgtggtttatgacacagactataccgaaaacatttttgatcaagatatttttgggcagacatttactacacaacaagaaatgttagaagagattattactttgcttaagcaagggacgaaaagaatcccgcaggaacttttgcaaaataaattacagaagatttcagctgatcaatttgctaaaaatgtgtctgatttttatcagtatgcaattgatcactatcaacctaagcatgatgaggagactaaaaagaggaactaaatgattagaattaatatgttctcgcaagctgattctgttaaaggacagggtgtaggttcagcttataatgaattgattaaacttctgaggacgcacttagtagacgaattttatgtaacgattaacaaatatggcaatagcgatttaacgcattatcacacgattaatccaacctattacgcaaatagttttttaccagcacgtggcaggaagattggctatgttcactttttaccagatacattagaaggctcaattaagttgccaggcgtagctaaaaaagttttttatcaatatgtaattgatttttataaacgcatggatcaaattgttgtagttaatccaatctttattgataagttggttaactatggaattgatcggaacaaggttagatatattcctaattttgtttcaaaaacagaattttatgaagaatcattggccagcaaaaacgcatttcgtcatgaattaggaattccacttgataaatttgttgtttttggtgatggtcaagtacaggaacgcaaggggatcgatgactttgttaagatggcacaagctaatcctgatattcaatttatctgggcaggcggtttttcgtttggcaaaattactgatggctatgatcattacaaagaaatggttgacaatccacctaagaatatgacgtttgcgggaattgtagagcgagagaagttagttaagtatttaaatattgcagacttatttgttcttccatcatatgatgaattgttcccaatgtcagttttggaagcattcagttgtggaacaccagtattattgcgtgaccttgatctttataaggcaattatcgatggctattatctaagcggaaaagattttggcgaaatgaatcaagtattgcaaaaagtagttgccaatccacaaactttgcagaaatacagcgaattatcgcgtaaggcaagtcaacagtattcagaagatcatttagctaaaatttgggacgaattttatcatgagcaatatgaattaggaaaagagctaggtcaaatacattaatgaataaaaaacatttgtggggcattctggttgttttagcaatcagtgcctttgtgctatatgcagatttaaaagctacaccgatatcggaaatattacgggcagctcatggcctgaatatttttggattaatcatggtttttgctttaatgcttttgtcctatgtatgtgaagccggtatcttagctactttagctcatcgaaagaaagagcctaaaaggtcagcttggtcgtttttgcgaattccaattattcaagctctatttaatgcaattacaccaatgtccacgggtggacaaccatcacagctagccgcaatgattcaaatgggcatggaaggtggccgttccacctcaattttgctgatgaaatttattatttatcagatcgttgttttgtttgcctatgtatttacaattatttttggctttcatatggtaatgactaagttcgctggtttagcaatttttattgcaattggctttttgattcatgttagttcaattatctttttgcttgcaattatgtttgcttatcgttttactaaaaaggcaactaattggttaatggacttgttggcaaaaatgatgaaaaaggaacgagttgagaagtggcgtaaggctactttagaaaagattgatactttttatgcagagagtcagaaactaaaaaaagaaaagaagaaattatttgttgcctcgcttttaacagtattgcagctacttttcttttactccgttccatttatggtattaacagcgctaaatgtaccttgttcttggtatcaagttacgcaaatgaatataatgattatcatgtttatggcgatcattcctattccaggtgcgtcaggaggggcagaatatagtttccaaacgttattctccaccttcatttcttcacatggtgcgttaattttggctatgtttatttggcgcttttcaacatattttttcggtatgcttctcggcatcttaggctggatttttaagccgaaaaagataaaaagcacaaaaatgattaatttttattaaaacaacggtgtcttactaaatttcgtagtaagataaattaccgtaatgagaggagcagaagcgcgtggaacacactaaatctttttttaggtggctgacacagactaagttaggcttttttacgattgttttagtcttgttttggcttaaaacttattttatctatttaactaagtttaatttaggagcagttggtccaatgcagcaatttttattgctgattaatccgattccttcagggatgcttttgctgggaattgggctattttttaaaggacgtaaatcctattggattattttagttatcgattttttgctaacactgtggttatttgccaatattttatattatcgcgaattttcaaactttttgtcattttcaattattaagacatcaggctcgacttccgataatttgggtaaaagtattgcaggaattacactagctagcgattttttagcttttgctgatattgctgtaattatcgtgttattggcgaccaaagtaattaagatggatgttcgtccactgaagctaaaagttaatttgttaattgaggctttggctgtcagcttaatgggactgaatttattgatggcccaaaatgatcgttctggacttttgacgagaacttttgataataattacatcgtcaaatatctgggaatcaatgaatacgctatttatgatggctataagacagcacaaactagtgcacagatggccaaagctaatgtttctgatttgaagtctgttagaaactatttaaaagaaaattacgttaaacctaatcccgcttacaccggcgtggctaaaggaaaaaatgtgttaatcatccatttggaaagttttcaacaatttctgattggctacaaatggaaaggtaaagaggtaacgccaaatctgaataagatttatcatcaaaaagagaccattagttttgataatttctttaatcaagtaggacaaggcaagacttctgatgccgaaatgatgcttgaaaattctttatacggactacaatcaggtagtgcaatgtctacgtatggtacttctaatacttttgaaagtgctccagccattttgcatcaacaagctggttatactactgctgtaatgcatggtggtgctggctccttctggaatagaaataatgcttataagtcatttggctaccaatactttatgccactgtctttctatcagaacaaaccaagctactatatcggatatggcttaaaagataaaattttctttgatcagtcaatcaagtacattgagcgtttaccacaaccattttatttaaagatgattactgtaacgaaccactatccgtataatatcgataaaaagaatcagacgattgataaaacgaatactggggatgaaacagttgatggttatgtgcagaccgcgcattatttagaccaagcaattggtgaatttatgcgttggatgaagaagacgggcctagataagaagacactagtagtattttatggtgatcactatgggatttcaggtaatcaccataaggctagtgcagaattacttaagaaagattcgtttaatgactttgataatttgcagttccagcgagttcctttgatgttccatatgaaaggactaaagggtggcattaatcacacctacggcggtgaaatcgatgttttaccaaccttactgaacttgctggggatcaaagacaaagatacgatccaatttggctatgacttgctaagcaaaaatgcaccgcaaattgtagcacaaagaaatggtgactttatcactccggaatattctaaggtgggtagcgattattatgacaccaagacgggcgaaaggatcaaacctaataagaaattaaaagaaaaattaactgcaatttctaacaccgtaactacacagctgtctttgtcagatcgtgtaattaatggcaatctgctccgattctataaaccaaaagggtttactagagtcaagccgaaggattacgactataacaaggcgccatctttaaaacgtttgtttgatgatccaagcaaaacttcactgtggtatcaaaatcatcgtaaaacgacgcaaaaagatttcaagacagatgcgcctgaactaaaaaaataactgcaaaaactagtaatttgtgataaacttggtaagtaaatcgtatgtgtgtattggaggcagcgcattgtataatttagttatgacgctactaatcattgtttcaatcttaattgtcattgcaacaatgatgcagccacaaaaacaacaagatgcattgaacgccttatctggcggtgccgtttttagtgggcaaaccaaaaaacgtggttttgaagcatttatggaaaaagtaacctcagttttattggtactctttttcgtctttgctattatcttagcttatatgtcttcaaaataaattttgtacctcccgatcaaaatatgatggggaggctttttttattaaatttaaagatcggagaataactgcatggcacaaaacgaaaaaattttggccggcgttttagaaatttttcgccataatccacaaaaacaatttcgtgtagatcaaattgaacgtgaagcacgtcgtgatagattaggtaattttactgaattaattaaggctctttcttttttagagcacgataaaaagattattacagatggcaaaggacaataccaattagctcaagaaaatactgaagttgaaggtgaatttagagctaatgataaaggctttggctttgttagattagatgatgaaaatgcggacgacgtctttgttgccgcagattataccaagtatgccgttaatggtgaccgagtaaaagtaaagatcactgctggtggtaatccttggaatggtaagggaccagaaggtcaagttgaagagatccttgaacatggtttggaaacgttagttggtgaatttcatccgctaactgatgaacaaagaaaaaacagtcattttatcggctatgctttgagtaacgataaaaagttgcataaataccgggtttatttgtctgaaaatggcttgatccctcaaatgggcgatatggttaaggtctcaattaaggattatccagatgaggaaaatcctgagtcaatgactggtgcagtagtcaacattattggtaataaaaatgaccctggcgttgacattatgtcaattgtggcagcacatgatgtaagaactgaatggcctgaagatgcaatggcgcaagctaatgctattcctgatcatgttactgaagaggaaaaaaagggtagagtagatattactgaccaacctgcagtcactatcgatggggatgattctaaggactttgacgatgctgtagttttatggaaaaagcctaacggcaattatcaccttggtgttcacattgcggacgtttctcactatgtgacagaaaatacgccgttgaacgaagaggcatttgctcgtggcaacagtacttacttagttgatcgggtaattccaatgctgccatttagactttctaatggaatttgttccttaaatgaaggcgtggaccggcttgttttgtcatgtgacatggaaattacgccagaaggtaaaagagtaggttataaaatttatccttctgttatgcgctcacatggtcgaatgacctacaacaaggttaacaaaactcttaagggcgaaatgaatggtttagaggataagtatgttaaactccgaccaatgcttgaagaaatggcagatttgcatgctgctttgtataaacaacgtcatcaacgtggtgctattgactttgaagaaccagaagcaaaaattattgttgatgatcaaggcaagccaacagatattgttttgcatgaacgtggtactgccgaaaagatgatcgaatcatttatgttaatggctaatgaaaccgtggccgaagatttcttcaaaaagcatgttccattcttgtaccgtgttcacgaaacaccagatgccgaaagaatcaagactttctttgaattttgtagcgcatttggcttgaatattcatgcggatccaaataacgttaagccaattgatttacaaaaagtagtttctaaaactacagatactccagaggaagctgtagtacaaatgatgatgctacgtagcttaaagcaagcgcattattcagaagaagcactgggacactttggcttagctgcagaatactatactcactttacttcaccaattagacgttattctgacttgatggtgcaccggatgatccatgcatatcaagaccaggggactaatgaagaagtgcaaaagcattttgctagttacttgccagatgttgcagaacaaacttcaacgcaagaaagacgttcaattgatactgaacgtgaagtaaatgacttgaagatgacagaatatatggccgatcaagtggggcaacactttgacgcggtagtatcttcggtaactagttttgggatgtttattcaattaccaaatacgattgagggattaatccatatttcgaatttgactgatgatttttacagttttaatgaaaaagcattgacgctaactggtcgaggtactcataagcaatataaggtagggatgccaattaaggtaaccttgattaatgctaacgttgaacaacatcagttagactttgaaatatatgatcctaatgcgcctaagcataagcataacgatcgcggaatgaataatcgtcgtcgtggaaaccgtggcttccgcaataatcatggacgccgtggtggtcagtttaataatcacagcgatcatggccgtggccgaggtaatggaaaccgtggaggtcggagaaattttaaacattagggattgatcttaatgaaaaaagaaaaagaagataatttaattgcacaaaataaaaaagcacgacacgactattttattaaggaaacattggaagcaggaattgctttaactggaaccgaaattaagtctgtacgagctagaagaatcaacttgcgggatggttatgtgcagatcgtcaacggacaagcctggctagaaaatgttcatattagtgaatataagcaaggcaatcggtacaatcatgagccactacgtagtcggcgccttcttttgcataaaaaagaaattgcacgtttggccaaagcacaatcagagcgtggtattgcaattattccacttaaagtgtatttaaaacatggctttgccaaggtattgattggtgttggccaaggtaaaaaggaatatgacaaacggcaaacaattaaagaaagagaccagaagcgcgatattcgacgcaagtatggtgtctaagatgagtctgagaagaatctcagactttttttgttgaaaaattttaaaaagtttttttattttcacaaagtaatgttcgaacaatttgaagaatgcagagaaaatcaagctaaatatttttttaattattatagaggcgaataatagtattaagatacgtttgatattgaaatattcatattaaaaatccgaacgaagagcaagacttgccaaagcggagaaaataaggtaaattaataaagtcgcttcgagagatgcgacgagagcttaaaaacagacatgcaaggaaagaaaacaaataaaaagaaaaaaagtacttgcaaagaagtaaataagctggtaatatatttaaatgtcgtcaggtgaaagcagaaaaagcttgagtaagacgaaaaaacaaatcaaaaaagttcttgacaaagaaatgatggtttgataaaatatgaaagctgtctgctttgcaaaaaagcaagacagaggtagtactttgaaaactgaacaaagtttcgctaaaagtgtgcgggtgtaaaaacccaaacaagaagcgaagtcaattcgcgagcaataaatttgagacaaagatcttaaataaggaatgagcaatcattcaaactttttaaaatgagagtttgatcctggctcaggacgaacgctggcggcgtgcctaatacatgcaagtcgagcgagcgaaactaacagatttacttcggtaatgacgttaggaaagcgagcggcggatgggtgagtaacacgtggggaacctgccccatagtctgggataccacttggaaacaggtgctaataccggataagaaagcagatcgcatgatcagcttttaaaaggcggcgtaagctgtcgctatgggatggccccgcggtgcattagctagttggtaaggtaaaggcttaccaaggcgatgatgcatagccgagttgagagactgatcggccacattgggactgagacacggcccaaactcctacgggaggcagcagtagggaatcttccacaatggacgcaagtctgatggagcaacgccgcgtgagtgaagaaggttttcggatcgtaaagctctgttgttggtgaagaaggatagaggtagtaactggcctttatttgacggtaatcaaccagaaagtcacggctaactacgtgccagcagccgcggtaatacgtaggtggcaagcgttgtccggatttattgggcgtaaagcgagcgcaggcggaagaataagtctgatgtgaaagccctcggcttaaccgaggaactgcatcggaaactgtttttcttgagtgcagaagaggagagtggaactccatgtgtagcggtggaatgcgtagatatatggaagaacaccagtggcgaaggcggctctctggtctgcaactgacgctgaggctcgaaagcatgggtagcgaacaggattagataccctggtagtccatgccgtaaacgatgagtgctaagtgttgggaggtttccgcctctcagtgctgcagctaacgcattaagcactccgcctggggagtacgaccgcaaggttgaaactcaaaggaattgacgggggcccgcacaagcggtggagcatgtggtttaattcgaagcaacgcgaagaaccttaccaggtcttgacatctagtgccatttgtagagatacaaagttcccttcggggacgctaagacaggtggtgcatggctgtcgtcagctcgtgtcgtgagatgttgggttaagtcccgcaacgagcgcaacccttgttattagttgccagcattaagttgggcactctaatgagactgccggtgacaaaccggaggaaggtggggatgacgtcaagtcatcatgccccttatgacctgggctacacacgtgctacaatgggcagtacaacgagaagcgagcctgcgaaggcaagcgaatctctgaaagctgttctcagttcggactgcagtctgcaactcgactgcacgaagctggaatcgctagtaatcgcggatcagcacgccgcggtgaatacgttcccgggccttgtacacaccgcccgtcacaccatgggagtctgcaatgcccaaagccggtggcctaaccttcgggaaggagccgtctaaggcagggcagatgactggggtgaagtcgtaacaaggtagccgtaggagaacctgcggctggatcacctcctttctaaggaagcgaaggatatggagagcaggaatgctaagagaagtatccagagcaagcggaagcacactgagaaactttgtttagttttgagggtagtacctcaaagatttgaaaaacgccaagcgttagtcgggcctatagctcagctggtttagagcgcacgcctgataagcgtgaggtcgatggttcaagtccatttaggcccattgacataacgaagaaaaagagttaaagttatgtctggccgaaaataaaatactctgggggcttagctcagttgggagagcacctgctttgcacgcaggaggtcatcggttcgaacccgttagcctccattgatccagaaaaaggatcaaagagctagtacattgaaaactgaatataatccaagcaaaaaaccgagacaatcaaagagaacagattgtagagcgaccgagaagagaattcttgagtaaggtcaagtagaaaagggcgcacggtgaatgcctaggcactaacagccgaagaaggacgtgacgaactacgaaaagcttcggggagcggtaagtacgcagtgatccggagatatccgaatgggggaacccaatgcagagatgcattattgattagtgaatagatagctaatcaaaggaagacgcagtgaactgaaacatctaagtagctgcaggaagagaaagaaagatcgatttccttagtagcggcgagcgaagaggaaagagcccaaaccaagtgatttatcatttggggttgtaggactgcgacgtggcagtgtaagagatagttgaattatctgggaaggtaagccagagagggtgagagccccgtaagcgaaatctcaagcacgcctagcagaatcctgagtaggccgggacacgaggaatcccggttgaaaccgcgaggaccatctcgcaaggctaaatactagttagtgaccgatagtgaaccagtaccgtgagggaaaggtgaaaagaaccccggaaggggagtgaaaaagaacctgaaaccgtgtgtctacaagtagtcaaagcacattaaagtgcaatggcgtgccttttgtagaatgaaccggcgagttacgttatctagcgaggttaagtcagaaaagacggagccggagcgaaagcgagtcttaatagggcgaaaagttaggtgacgtagacccgaaaccaagtgacctacccatgaccaggctgaaggtgtggtaaaacgcactggagggccgaacccacgtaagttaaaaattgcggggatgagttgtgggtagcggtgaaattccaaacgaacttggagatagctggttctctccgaaatagctttagggctagcctcgtggagaggataatggaggtagagctctgtttggactaggggcccgtcaggggttactgaatccagataaactacgaattccagatatccatacacgggagtcagactgcgagtgataagatccgtagtcgaaagggaaacagcccagatcaccagttaaggtccccaaatctatgctaagtggaaaaggatgtggagttgcgtagacaactaggacgttggctcagaagcagccatcattcaaagagtgcgtaatagctcactagtcgagtggcgctgcgccgaaaatttaccggggctaagcatagtaccgaaactgtggatgtgttttaaagagcacgtggtaggagagcgttctaagagcggagaagttgaatcgagaggatcaatggagcgcttagaagtgagaatgccggtatgagtagcgaaagataggtgagaatcctatccgccgaaagactaaggtttcctggggcaggctcgtccgcccagggtaagtcgggacctaaggcaaggccgagaggcgtagtcgatggataacaggtagagattcctgtactgtgtcaaatcgttaagagcgaaggagggacgcaggaggtgaagcacgcatcgcgatggaacgatgttcaagcaacaagtgcggttaagagtcaaatgcttctaaccagcaacacgagttgtgaagaggagtgaattaaaagtagcgaaggtgtggtaatcacactgccaagaaaagcttctagccagagatgacatacccgtaccgcaaaccgacacaggtagtcgagtggagaacactaaggtgagcgagagaactctcgttaaggaactcggcaaaatgaccccgtaacttcggaagaaggggtgctagccaagagattggttagccgcagtgaataggcccaaacaactgtttatcaaaaacacaggtctctgcaaaatcgtaagatgacgtatagaggctgacacctgcccggtgctggaaggttaagaggagagcttagcgtaagcgaaggtttgaattgaagccccagtaaacggcggccgtaactataacggtcctaaggtagcgaaattccttgtcgggtaagttccgacctgcacgaaaggtgtaatgatttgggcactgtctcaacgagagactcggtgaaattataatacccgtgaagatgcgggttacccgcgacaggacggaaagaccccatggagcttcactgtagcttgatattgagtatcttttaaacatgtacaggataggtaggagccagagaagataggacgctagtcttattggaggcaatgttgggatactacccttgtttgaaggatgctctaacctcgacctgtaagccaggccagggacagtgtcaggtgggcagtttgactggggcggtcgcctcctaaagtgtaacggaggcgctcaaaggttccctcagaatggttggaaatcattcgcagagtgtaaaggtataagggagcttgactgcgagagagacaactcgagcaggtaggaaactaggacttagtgatctggtggtaccgtatggaagggccatcactcaacggataaaagctaccctggggataacaggcttatctcccccaagagttcacatcgacggggaggtttggcacctcgatgtcggctcgtcgcatcctggggctgaagtcggtcccaagggttgggctgttcgcccattaaagcggcacgcgagctgggttcagaacgtcgtgagacagttcggtccctatccgtcgtgggcgtaggaaatttgagaggagctgtccttagtacgagaggaccgggatggacgcaccgctggtgtaccagttgttccgccaggagcatcgctgggtagctatgtgcggaagggataagcgctgaaagcatctaagtgcgaagcccccctcaagatgagatttcctttgcgtaagcagtaagacacctcagagacgatgaggtagataggctgggagtggaagtcctgtgaaggatggagcggaccagtactaatcagtcgaggacttgaccaaagcgaagcaaactggaaggttttttgcgagaaggattatgtttagttttgagtgtaaaagctcaaaagagtacggtggcgaaagcaagaaggatacacctgttcccatgccgaacacagaagttaagcttcttaacgccgaaagtagttggtgggcaactgcctgcgaggaaaggaagctgccgtgctcttttttaatattccggcttagctcagttggtagagcgcttgactgttaatcaagatgtcgtcagttcgagtctgacagccggagtactttgtatggaatgttgtccgagcggcttaaggagcatgattggaaatcatgtatacgggcttatacctgtatcgagggttcaaatccctcacattccgtaattataagctcgtaagtgttgatcttacgggctttttgatatattgcggtctctaaaaggtctccaacctcccaaaaacggctaaatttcatctagaattgtaactatttgtttatccgatttttgttttaattcgtccagcatgtaagcatatgtattggctgtaatgctcatattggcgtgtcctaaacgtttacttattgaataaaggtcaacacccttaaagagtaacatagccacgtgagtatgccgtaagctatgaaagtgaaaaccttttttattaatattaagctttttaaaatatttgcgcaacactttattaacggcacttgaagttggaatggttccatctttgccaataaataatctttcgtgaccgttctgttttagttgactaagaatattgagtaaatgctgatctactttaataacgcgagtagaggaacggttcttagtttctttgtcaatttcatctgaatcataatcaataattttgttattatcataattccatgattttgaaatatggatagtgcagtttttaaaatcgatgtcgtgccaagttagtactctgatctctcccgggcgcatgccagtataaattatagtcaaaagcatatatctactgatgtaagcaggggtaattccgtctaaaagcgattttttgagctgctgaacttggctgaaatttagataatctatttttctactgcgttcattattccaagtcaaattaattctttcggtaaaattaattcttattagtccctcgcttatagcgtctttaacgctagttcgaatacttccattagtcttatataccgtaccttttacgtgcgtttttccatacttattcataaaatcttgatatttgtgtctagtaatttttgaaattttagttttgccaaaatactcagacaaattatcataaataactttatatctattcttagtggtgtttgaagtgccaggcgttttataggtctcataccagtccttaaagtattcagcaaaaattggatcttggttagatatttgattgtcgtcttttgcaacttccatctcattagcccattttctggcggctgttttggtcaaaaaaccttgcttgcttttaaatctatgctttccgcgaacatcgtaccaggaaactttagcgcgccacgtgttgccccttttttgtaagtaagccataatttaatcctctccttattaataaagcccgtttactcagttgagtaggcgggctatttttattctccttccttgtttccatcagtatcccaaattccgtatccatttccatcagtatcaaaaaatacaatatctgctttagatatattgccaggatatggcgctaaacgattataagcatcgctaatatcgtcaacaatggatttttgaattaaagttcgttcatctttagtgtcctgcttaataaaactttttgtgaaagtaacttcaatatgccccgatcccatgacattaatgctatcaatagtatcgccaccatatttttcagaatctaaagagctcaattgtttctttaaagtagtaagatgttctttttgaacttgtttgcgcagggatttattgctaggtactccagtttttttcgatgatttagaactgctactagattttttagaattaaattctttatcttgctttttagctattttatccattttcttttcaaattccttttcggattttgactttttcttagttttatgagacgtaggctttgattcggttgtttgagctttaggttcggttagcccacttacaactgccatacaaaagaaaatagcaatagaggaaatgattgtgatggttccatatttagaatctttaatatttaatttctttgctcggctgtgccgatatattgcaaaaacaattggcaatataaaagataaaaatattaataatacgcgtggtgctagttaaatcgttttagttaataaaaaagtccaatcttgttagactcgacttgtaaatagtaataatagaaaagagtctgatctgattgaactgccttaagcttaagcgttttagccaccatttacaagttagttttaaagatttagtgataatttgtcggcactggtatcgtttgtatgcaccggctgagtttactcatcggcgaaatattgatcaaattaaaactacggacagtctgattttggctttacttatctggcaagctaagacaggaattgaatcacaaagaagattctgtgaatgtttcaattgtttatcacactcacgttttaatcgacgttcacgtcagctattgcaattgatttatcagatacggcaagaaatgaataaaaaggttgacctgaatggacagttcttgatcattgacagctttccggtacctgtttgccaaccaattcgcaactatcgtgctaaaatttttcgcggttatgccaacattggttataaggccaccaagaaaatttacttctatggtttcaaagttcatgtcattgttagcgatgacggttacattcttgattatgtcgtaacaaaagcatcagttcatgatgccagggagacagttgaactgatggaaaatacccatccatctaattactatcttcttggcgacgaaggctatttaggcaaagaactgcatcaacagctaaaacaaatgggttatgaactttggacaccatatcgtaaaaatatgacaggagctaaaaagcacaatgatcatcaattgatggctattcgcagaacaattgaaagcgacttttcgcttctgacctattacaatgccgagaacaatcgagcacgtagtctgataggctttcaaagccggttggaaattgcaattttagcttataatttggcttattgtctagaacgatttaactagcaccacgcgtattaataatacgtgcatttaaatactcctattcttcaaatctatatctatttaattcttcctgaacctgtaaataatcttgtgtcccaatacttttagcgatgtttagccagttagcatcttgaatttcatttcctaatgcaaaatactgcttaactttttcgtgaatcatgaaaacatttgctccgtgttcactgcaggaatgagcaccatcatccgtttgatagtcgcctaaaacatcgccatcatttttagcatgtccgatttcatgaagaataacgttttctacttcgttgtcatcaagcttagagttaactactaccacatcgggcttgccatctttgccatgaactattaagccagggcaatgtaaaggggcaaatgcaagctttaatttgagtaatttactaacattggtatccataaataaacaccttatttttcgctgtaaatccttttcaatatacctctaactaattccctgtcatgttcgtctaatggcttgccatcaaaagagcgggcatcatctagcatgtcatctaaatcatcatttacttctttatcgtttggtgctggattatcaactttaccagctaagtagtccacactggtatcaagtattttagccagtttaactaaagtgtccatgtctggatcattgtacccgtactcccaattagcgtatctagggaggctaaccccaatcatgttagccatttgtgttttgctgtaattgtgatcttccctaagattagacaaacgttcattaaacttcattttgctacctccttatttaacctacatatttattttagctttgatacagtaaatatgtagaaaaataaagaatttctttacaaaagtatttacattatataaattctgtagtagtataaagcatgtaaagagttacagaaaaactttataaaggagatgagcgaatgacacaggttactgttgccaatgctaatgaaattttaaagcaatatttaaagtctcacggtattacacaaaagtttgtagccgataagatgggggttaatcgacaaacctttaacgcttacgttaatgggctaatcaggtttgatgccgattttgcgttaggggtttcagaagttctcggtatttctccttcgatttttttaaaagaaaaatacagaaaatctgtataaggggggcgagttaaatggaccaattaatcaatacttcaattttgaagaagttagttaagcagattgttaatgaatcaatcaaagacaatcaagacgacttaacgggtaaaacttggagcattgatgaatttagaaaaatctgttgtcaaggtaagggtaagagttgggttagaactttcatctttgacgaatacccggaagttaacgtcaagcgtggcggatttgtagtaaatcctcgcaagacagccgagggtagcagaacaatcatctttgcaaaagaagcttgtgaatggatgcagaagcaccaacatgaaattgattggaacgcgaaagtcccagtttaggaggttaaaaaatgacagtagttacagataaaaaagtttacgagattgcaagagagtttggcgtatttgacgacaatccggaccaattcaatatcaccagcgatgaagattatagattttatctctggctagacaatggttcattagtggcttttgaacctggttataaaggtttacaagacttattaagtgaagtgatggttaggttctttgaaaaccgtaaaaagtcggaaaagacaacagaactagtaaacgaagccagaaggtcagtgattgattactgtattgaaaacggtaagcaagttcaaagggagaaagcaaaatgagcgaatacgaaagagagtatggcaaaactaagttagatcacgttttaagtcatatgactaaagcgtttggaaagttcttagaattcttagcaattctatttttaccatttgcaatcgttgaacaggtttgcatttacggtacaacgcactccgatcaaatcatttcactattgttagttctattaattctctttacggctttaggcgtacgtgccgtaaagaagcttagaaagtaggtgaaacacatgagtaattcagcaattttcaaagttcgtttaaagcgaacaagaaagaacaagaacttaacacaagagcaattggcggaagccgtagggcttggagttagaactattggacggtatgagcaaggttcaagttttcctaacaagcgagtacttcatgaacttgcgaaagttttaaaagttaagactgactggttatcagcaacgaattaaggagactaaaaagtgagacaagacagttatgacattttgcaaaaggcagttaaggaaattattcaaaacgaaaattcgtttgcaattcttcaaatcccaggcgacaccttgcaagtaccactaaaatccaaaaatggattcttgggcattgaatgccaaacagcaactatggcgtcgctgcctcaacaaatgattctagcgattcaattttacgagcgggtaaagaaagaagcagatgaaaacgggctatcgacggattttaaagctcttaaaaaaatgattaaagagcagttggaggactaatgaagttatggaacaaatttataaacgcgctattccaagtagacaaaaggatcgacttacagacgtccaatgcggcgttcttgctaatagtaatgctatcagcactgctagtggggatttcgctagattgaccaaagaagttaaaaagtttcttggattggcaaagcaaaaagccctctactgctagagacagtaaagggtgttaaacaaagaaaaaatatttcaataaggagattataccacatggaaacgttaaatgcagaacaagtaaaagaagcaaagtacttgtatgaaaatcaagcgttaaaagatctatcgctagaagaaccgggcgcaattcttttctgggacggtgaagagcaagcattaattactaaaaatgctgatgactttgacaacgcatataaagagccaatggactttttcatgaaaaaggtaaaccaagactataaaggcgacttgagcaagtttgcaaaatcgcttggttacgggctaggcaaagcaagcttttcaatgggcgatttcttagccgattggaatgacttaaaccaagattcactaaaagaattgatctttgactactttgacggcgaagaactaggagatatttacgatggctaacaacgaactaatccaatttgacggtattgagtacccagtaagctataaaccagctgaaattattttcccaaagtatgaagagatgaaaggcaacatcttaaaagttcatgatgaattcgctgattggacagtaacgccgcaaaaccctaaatcttccaaagaagtaagaaagaatctcaacaagcttaaaagaactatcaattcacaaagaatttcgattactagtggaattcaaaagccagcaaagatgtttaaagcaaacattgatgacttgatagcgattattgacgaaacaactaaaaatatcgatttacagcttaaacagtacgatgacaagctgagacaagataagcatgatcaacatgtcaaatttattaaacaggcttgtaaagacgctggcgtagaccctagcaagattagatataacgccagctgggataacaaaacttatagcaaccctaaatttgaagctgaattatacgagcaagttgatattttacgcaaaaataagcagcaactcgaaactaataaacgaatcatcattcaaaaagccgatgaactaggaattccgtttgcacactacttcgatcaattgcaaagagaggtccaacttgatgagattcttaatgacatgcaggcggagaaagaagaattgattgcaattgctaaaaagcaaaaagaaactaagcaaaaagaacaagccgacttggttaagcatggcgataaggcgattgaccctcaaacaggagaagttaaggacaagacttatactttcagtctcgaatttcaaaacgttactaagtaccaagtcgatcaattgaacagcttcttaaaagactggggaattaaagcgaggagaattaaataatgactacaaaagaacaagggtttagtgattttttttgagccaaatcaagaattaattaagaattttgacatcaaaaagtataagaaaacgggcaatgaaccaaaactgaaaattcttacttatacgaatgagcagcagaatcgaaaagataaagcttcatgggctatgcacttagccatggtcaagatggctattgtgcagccaagaaagacacacgaagttgaagttcgaggaaccactcaaaacggcaagccttatcactacacttacaaatatgctgatttagctgatgttgataagtcaattatgaacgctattaaagctactaagcaagatgataagccattgttgacttactacttcgatattgacaacggtgccgaaggcgtaactattgaaaccgtaatcgttgatgcgacaacaggttacagcgtacgaaccaataaagtttggttcaaaaatgttaacgttggtaacgcacaagcaacagcaagcctgatcagttatggaaaaaggtattcactttcagccgcatttgggattgcaagcgaagatgacgacgatgcgcaagcccagaaaatgaatcaatcacaagtagttgattgaaaatgctatcaaaataatttttgaggattacgttaataatcactcaattaaggctaaaaactggattaagggtaagcatgacaaggctacaagtgactatatcagacagttgcttggtgattacgagctaaagcatcatattgacaagacaaagcaaaaagcaattgaccgccgaaaagaaaaagaccagcaagttaaagaagcggtcaaaaagataaagaaacctaaatcggaggacgaggtaatcaaggatatcgtggataaacctaaaacggacccgttccctgataaaaaagaagacgctccaatgagtgaagagcaacaaagcttatttgatgacattttaggtgattaaaatggctaagaaaagaaaaactagcgagaacaatcgcaagtttaaaggagtttggatacctgctgattactggctggatgagaatttaagcattatggaagtagtcatcttaactgaaattgacagtcttgatggtgagaacggttgctttgcaagtaataaacattttgccagttttataggaatgacaccggcttatgtatcaaaaataatcaagcacctaaaggaaaagggctatataagtgttaattacaaaaccgaaaatcgggttaccacaagatcaatcaaaataattagaggtactaactctagtaaagggggtattaacaatagtttagggagtattaactctagtaaacagggtattaacaatagtttagaccctattaactatagtgtaccaagtaatacatctagtaatacatctaatagtaatacagatagtaattcttcttctggacgaagaagagaagaagacccagaacgtgaacaaatttataaacaatttttccaactggcaaggatgtacgacaagatgaagcaaaaggctactaatccaacctatgacgaaattaagcaactaagaagcttgctttaccggtgcaacattgacaccttaaaagccgtcgttagcaagtttgacatgaaaatgcaatggaacatggttaatgatccattcgcctatctgctaaaaatgcttcgtgatgggttagcaattgacaaggattctgaaaggtggggtaagtgatgaacaggttaagagaattaagaaaaaatcatggcttaacgctgaaagaattgggcaaaaaagtaagtatgcacgataatactttgagccaatacgagacgggaaaacgaaatcctagtcttaaaacttggcaacagctagccgacttctacggtgtatccgtttcttacttgcaaggcagatatgaccacctaaccaaaaaagaagccttgcaaacaattcatgaaattatgaccatttgcggtattagcaaagaagagttaaaggataggctgtaaaaaatgatttttgatttaaaaattggttgcgtagtaactccacgccaattatctgatgtcttccaatacgcctttatgagatggaagcttggtgttgactatattcccaatagtcgcctttatgcgattgatacgcggaataacggaaaaatccaagttacgggtgatcggaaaatcgtttacttgggacttggtacttggaaagtaaaggactaaaacaatgactcaaagaaattacaaagaaaaaaatgttcaagaaatgaacatggaagatttaatcaatacggtaagcgatgacttaagtcgctatgacaagcttaaaacgcttgaaggcgttaaaaaagaaatgtcggtcggtttgtttagcaacaacttatctgaaagagggctaaaggcttatatcagattgctagagcttgaattgcggttagcaactacaagggaaccgatctttcatgattcacgtggttttggcgattacctagccggcaaatatgcggaacctgatcacgaagaaatgcatttgatcagtttaagcaaccaaggacaaatcatttctgatgatttagtgggttcaggaacggtagagaattcagctatttcagtgcccctaatcgttaaaaccttatgccttaatggggccgctaacttcattgtggtacataatcatccaagcggttcaatgaagccctcaaaagctgatttaaagatgactgattcaattaaaaatttgtctgagctaattaaagtacgcatgttagaccattttatcgttggtaatggaaattacttttcatttgctgagcatggtttactaggagattaacatgaaattttatctaacaagtcaaaagtacgcaaacagcaaccctaatttaactgcttatgaaattgaccagattagtaaagcctacttagggaagcttagtaacgtttgcacagttgaggtttggctaccgtctaagatcaaaaagacaaaatatgcgggagatggtatctgccgcggcggatcaatcgttattaacattgcagatgtacccacttggcaattttttagaaaaatgttgggtaaagccttccttatggttgctttaatgcaaccagactatccaaaactagtaattaaagatttatagaaacaaggtaaaaacaaaaaatgaatacaaagtacaattttggcaattgtaagtttaaagcaagtaaatttagtgaattggataccaacccaagtcactacaagaacagtagctttacacataaccgccctagttctttgaacagctatacaaagggcgtagcaattacttacgtaaacggtcaaacctttaagactaaggatgtaactgtagaaagcatttacgaagctttagcagaaaataacaactggcttcggctaaaaaacggggggtgcattaatttgaaccacgtgacgcactttgaaccgtataaattctttgaccgccctagggacgaaatgccagcaccgtggacggttggacacgcaccaaaagtgagaaacgatcacaatgcctagtgttctgtttcgggtaaaaagtcttgacggtgatccgcttatcaagattgttcttaacgaaaaagaaaagtacgagttgtactggctttatcctttcaaaaaatgtgctttaggtgagtttgataatttcactgaagcggaggttgcgttaggtcagtattacgggtttgaaaatattgaagaggttaggagttaaaatgcgtaagtttgtagctattgaggttgggccacggtccagcatggagttagatgttgaaggtcgttggctggtacggtggggtgttcctatcacgattaggggatttaaattcttctttataccaatggcaaacccaaaaaacgtgagaattgaagcttattcgcttgatagtttgaaaacttttgataggtttcacatttcacatgaagtagcttggaaaggttgctcaacggaagaaggctttattcggacggtcatgccgtttataactcgaattgataagcgtttggataatttagatgacgatggctggaaaacggtattcagggatgaatacatttcagcaattgcgcaatgtggcgcaagaaacaaaaaagaagctaagttactagaagattttaagaaacggaaatagcgatgaatgacttaaacgacttagctagaaaatactaagtggtctgatatggggctagataaccgaattcgcgagctgacgcatcaggcgaagcaaattgaaaagcatgacgtgctagcgcccgaagattggaatgaaatcgttgttatgacttacgaccttagccgcttagcccttgaagtaatggattacgcaattgaacaagaaaaaagaggtataggaggctaaatatggatcagccaaaattatttgatttaccttttgatgatgtaaataccggtgatcaattttactgcgaagctacgaacaccacatatacagttgtttggatgtttactggcttctttaacggagctcttttagtaagaactcatttagacaccaacttttcggaagtttgcgattatgcaaagcaaaaaagccataattctgcgatggaagaaatagctggaattctgcgggagcttgatcgacaggatcctttaaagcagataagaaagagaaagggttaagtaaatgaaaaaaattaaaatcgtatttctagcgtcaattatcgctgtaatgctgtccggctgtacgatgccgggatggtggaatagtgctatgacgaacactaacggtattgatacggggcattttaaggaggttgtggttatctattcggacaagagctctaagacctatagtgatgttagtgtgtatccctataacaatggtggtaatgattcgactggtgaaaagattgaaatccggcaaagaggaaaagttattgttttacctaatgacgcgcaagttgagttaagaaagaattaataaatatgaaagacgaaacagtaaagaaaattcagaaatcagtggaacgtgcggatgatatgacaattgcattagactatatcaaatctgcgatagtggttgactgtgccgaaagccttaccgcaaatgatggtcatgttttgactgatgaagaaatgcgagtagttaatgcgcgcttgcttatgaaagcactgaccatgcttgatgatcatgaaatgcatgaaatactttcgcgcttgaacaatgataaaaaacatgatgcacatactgaattgcttttaaaattgattgatcatgaattcgacaagctaaggcaagagcataaagacaatgattttttgaagaaggtgacacacaatgacgatgatgactagaaaactgatcacgtcagcggaccagctagttgacggcaagcaatatgcattagttcaaagggaattcactattaaggttacatttagcgaagtggtgcaccctgaacctcagccaggctattggactactgacgacatagcatgtgctcaatttattggcagaaaaggcataggctgcattgttggagaagaccgacaacggttatttgacggactaacagagataggggtgaaaatttatgaactgtaaaagattaaccggacatggacaagatgaaatgatgtttcattgtgataattgcggggaaaacgtatcaatagacacttacgatgttttaacggcagaagacaacttgcattgccctctttgtggcgcaagcgccggtcatttagctgtctatatgtttgatgaaaagaagctaagagaggattaaagggatgaaaattcttgatccagcatgtggttcaaagatgttttggtttgataagcatgagccacatactacttacacagatatacgtgatgaaatccttactgctaaggatcgtaaatacactaggaaaatagaaatccaaccggatcttgttgctgactttactaagttgccatttcgggatatggaatttcatttaattgtttttgatccgccacatctcaatgtagctggcaaaaatagctggttagcgaaaaaatacggcaggctagataaagacaactggcaagatgaattgagagcaggcttcaaagaattgtggtgtgttcttgcactagatggggtacttcttgttaagtggtcagataaccagatcccttttaaagacgttttgaaacttgttggccacgatccaattttaggggacaagcgagggcatacaagatggtttgtattcattaaacctaatgacacttatacatcaatgtctagtgtactaagtgataaagagctgaaagagcgggggataagccatgattgatgtaatcaaagtcctgctggtcatgttcatcgtcaccgcgatggtgtggctggcggcatatacggtattgactgcggtcaacgttttaaaagattggtggcgtagcaaatgaagcaagaagatgaaagtaaacttggaaaggttaatgaacttttgggtgaggtctatgggctatgttttgggaagatcactaatgctgagtacgaagttacgaatagctatacgcgtgctggaaaaattattttattcgttgattctgttaaaagccgaccaatgactttggatcgagcatttgaagcactgcgcaggaatttgcaagcaattaaaaataacgttacttgtactaaaaatggagcaaacatagctattttttacagtgacacgaggatagcaacgattatagaagcttttgatactaaaagtaatgaaaaaactctggctgttgatttggaaaaagaaattctatcagctgatatcgttgccaaaattgtaaatgctatcagttcgtataaagaactgtggttacaagcaaaggaggacaaaaatggcagacaaaagagtgatgaagcgtaaagaaggctgctatctttgtgggacgttgaacgcttatcacaatggacctggtttaagtccaacaagaaatttttcaagaataaaaaggcctcatatcggtcttaatgaatttgatggcaagtggtatttgatagctgatggggtaccttatccagtaaagcatttaattgcgggcgaaagcttgatgaaaacaccaaatttacagttacggatggactgcaatatttttaggaggtttagaaatgaacgataaagaaaagaaactaacagaagcactaaaagagtattttggcagggatgttggcgatgttgagggtgagcctaacttcatggattattctacgaaattaccgggtttggtgcatcctataaagcgtatcgtgatcactacggtaccttacaaaccaacttttgaagaaagacgtaaagagttggttgaccagctagataaggatttgaaagaaattgatggcgactttaatgtgaaaattaaaggggataggatttacatttatctttgtgcagttcgcttatatgaattatatggcgaggataacatggctatttatagcgtttatttaaaagtggagaaaatggccaaggctatggaggctatttcaggcttttcatggaatttgaggcaactaaaggagcaataaaaaaatgactagtgaatcagtaacttacttaaaaaatatcttagctgtccaaaatattagcggtcttattacttctgagggctatgacttaatcgatcaagaaaagttagtaactaatcacaatcaggctaagattttagctcgattggttaaagaggtaggtactaataattacaacgccggttacgctgaggggagagctgaacaagcgtttgaagacggtaaaaaaatggctgagtttatgaaaggagcgtcacaaggtgaatgacttagtaatcatgaaaagccagaaggctttgacaactagcttgaaagtagctgctacttttagtaaagagcataaaaatgtgcttcaaagtattagaaatctcactgctgaaaattcagcagtgaaaaagatgtttgctgaaagcacttatgttaatgatcgggggcaagaacagccaatgtactacatgaaccgtgacgggttcaccttgcttgcaatgggctttaccggcagggatgcaatgaagttcaagcttgaatacattgaagcctttaatcgaatggacgaattaattagaaatgaagacaacttaccgcaaacgccggaagagcaattacaactaactatggtggttgctaatcgccttgttaagagaatgggcaaggttgaagcccgtgttgaccatattgagaaaacaagtgaattaagtgaagttcaacgctaccagctgcttcaagcaagaaaaaagaaggtaattgaagccattggcggtgtaaatagcaattattacaaagaaactaaggctagaaaagtatttaatgcgtttggtagagatttcaaaaaagagtttcaaattccaaggtatgacagtttagaaaagcaatactttgaaaaagctatggaatttactcacaattggtatcctgattttgtccttcaacgtgaaattcaaaattccaacgcacaaactagcttaaaaatttgataagaggtgaattgatgttagacattgaagtaggagaaacaatcacagacggctttaaaacttatgtgatgggacatgacttaaatttgcattttgtcagttatggcaaccatgcaactcatcacgtaagcgaggatgctttaaaaatcattttgaaaacgcaggagtaaaggatgcaacgagttagaagggtgagacgggaaccaggtcccgaacataggattcaaaacgcaattattgccaccttaaattggcggcgatgcgctgtcattaggctaaatgctggtgctattcctacaaggaatggtcatcttttcagggggttaagcctggaactcctgacttaatcgggtaccgtttaaaagataagcaagtattttttattgaagttaaggcgccaaaaggacgaattagtcaaatgcaacaaatgtaccatcttgatttaatgcataagcatgtaatccacggtatagctagatcggttgaggacgctgtaaagatcgtcaatgaaggcttaatcggctatggttatccagattacaaggaagtatgaagagaataggggaaacaatgtattttaaattaattatgctggtagttgctatatatgcttgtggcttaacagcttttagccttggtatagttctagcaagtaaaagaaaaacttggaatttaaagctagctcaatcatttggaattatctgttttggcgttattagcaacctatttattctatggatgccgcattgtaactggtttaatgcgtttcttggaatagtatttataatcttgccagttctagtatgttggtcaatattggtattagttccagactcacgggaagcctggtaatggcgtttttaaagattaaagaagcttgtgctgctaaaaacatcactctaaaggatttatcacgattgagtggaattagtgagagatctttagaatggtacgtcaagcaacaacgggagccgtctcttagtcgagtagaaaagttagcagaagtattagaagtttcgccagcgcggctggtttcatgggagtgaagattgtgagtttagcagacttgaattttgataaagaaaaaacgattagcaaggcaaagaattttcttgaaaatgattttccagacattatgaattattcaggtctgccggtaacttacttatctagtccacttctcgaccctacgggtgttcacggcggcggtaatgtaaaccatcagcccgatcaatttttaaaagctatcgagcaacaagacaagtacgatgcaattgttaaggactgtgaaaatgctgcccgtgctgtggttgaagctatgaacagttgtcctgataccgaacgggatccgtaccgcaaaattttggttagaagatacgttaaaaacgattttgcacaatggatttataacgatatgaattattctccaagaacgtacggacgtaaaagggacgaagcactttatatattcgctcaacacctagagcggtaccgcaagaagtacaatgctgaaaggctaattcccgtgttaatggtgcatggatgacctatttttgaccaataaacgccaatttttgaccgataaatgaccaacttttgaccgaaaaacgccaatttttgacgcatttttgaccaacacttgaccattaaagcgggttatattagtagagtcgaaagattaggaaagagatctgatctttcgatgttgctcgttaatttaacttgttagtcaattattacgagtcattaataaactcttgtttttactataaatatgggttgtgcaaaaggtgcaaccctatctcctacaagcctagtgtaacggcaacacgccagtctccaaaactggttatgaaggttcgaatccttcggcttgtgtagtctgcgaagacgtgtaaatccaccgagcggtctgagcttattaaacattgttctagtcctgataagctcgaaggcaagtttgaagaggcttgccttttatgggcagataggtagtctgctcaccgttaagttgatacttgttattaatttagattcctccaagaatttaggtgagtagcataggttcaatacctgcggtgcccgttgagtaatctggtgcgtaaaataagcaacttatttcacaacacattcaattgaattggttacgaagtgcacccgtgttggttcgaatccaacattactcgttgtagtcagcgatgatgggctactagaatccaaaaaattcaggatcacgttaattgcagtagctgctaagctattgctttttgtttttaggaggaaaaattatgaacaaaattttaacttttgccgctggtgtagtcattggcgtagtttacaaggacactattttacaggtagcaaagcaagtagaagccgcaaaggatgctaagtttgataagaaacttgaagacaagctggcaaagcactttaaagacgtaggcgaacaagccaaggaagaactagataagaaagttcctggtgcgtttgacccaagtaatctggatgacctgtactaatgatccctacacagtactttgagttatgtcaaagacatagccgtttagttaaggcaagaaagattgttaagcactgcaaaacaaatacggttgccaatatcaagcaaaagattctatttaagcaagaaacaggctttatgccacaagaatacttggataggttcgataagaaaggctaaagatgatgattttatagccgatgaatatttgcaatttgttccgacaaaagaaaagagagtttaataggagctgagttaataaaaatgtgtattcgcatggaccctagcggtcaaataatcccagaatcaaagaagtttagggataaggaacttttaaaaaagctgattattgatttaaaagatgaaaaggatgccttagattacaaaatctgtagattgcaagatgcaatttctaaaattggctctgatgattcggcaattattccttacaacagaagactgatggaaaaacaattagatgcaatggaaaattatagtttcgcattagaattgagaattagccgtacaatcaaggagaaggaaaatgaaagtagaagctaaatcaattggtgaaattaagccttatgaaaataatccacgtgacaacgatgatgccgttgatgctgtagctaactcaattaaagaattcggttggcaacaacctattgtggttgacatcggtggggtaatcatagcaggtcatacgcgctataaagccgctaaaaaattaggtttaaaaactgtgcctgttgtggttgctaaggatttaacggaagaacaagttaaagcatacagattagctgataataaatctggtgaacttgctacatggaatgatgaactacttgaagatgaattgggtagtattgatgacattgatatgtctaacttcggttttccgcctttagaaacaattgaggaagaaaatagcgaggcacatgatgatgaatttgataaagatccaccaaaagagccaaaaagtaaggcaggtcaaatttataagttaggacgacatcgtttaatgtgtggagacagcactaagatcgatgatgtaaaaacgcttatggggggggtacaaggctgaacctcctagttgactgatccaccttataatgtggactatacaggtgggcaaaaaagtcaaatgaaaattttaaatgatcatttagacaaagaagattttacaacttcctttattcagcattcaattgtgcaaaggaaaatatgaaagctggtgccgcttattatgtttggtatgcatcagcagaagctgctaattttaatcttgctttaaacaatagtggtttaaaagttagagaagaattaatctgggaaaagaatcaaatagtgcttggtcgccaagactatcaatggaaacacgagccttgcttgtatggctggaacgaaaatggatcgcatgcttggtactcagacagaaagcaaacaaccgttttgcattttgataagccaaaaagaagtgatcttcatccaactatgaagcctattccactatttgattatcaaattaaaaatagtagcaaggctggtgatattgtattagatctattcggtggatcaggtacaagtattatggcttgtgagcaaaataaccgttcttgttacactatggaatttgatcctaagtatgttgatgtaattattgatcgctgggaatcatttacaggtgaaaaagctgaattaattcaagaataatgccaacattgctggatttatacgctgtcagagctatcattacagtgtaaagagaaagcaagaggtatttaaaatgactaaatcagaacaccaagaacttagaactattattgatgaacttgaaactaaagcagcttatgcaaaattacatttcaactatttaaaagctaatatgtttaatgactggattgaccaaattaagaattgtgacgttggcttaaaagaagcaagacaaatgttacatgcaagcacactttaattaaaaatacagagataatcgtaggaactagttaaaaactagttcttttattttgctcaaaaaggagatgatttttgtttggaaaaagctaaaaaagatacaactggtagacctgaaaaaatgacacctgaaaagttagcacaattcaagttattcattgttgctggctgtacgcttaaaaaagcttgcgaacaaatagaaatcactccaaatacgtggcgaaattactgcaaaagacatcctgattatttaacgaagtttgctaagtggaaaaatgaacttgagagtagggcaaaagttaacattgctttaaagatcatcaatgaaaaagacacaagtacaagtgcttactacttggaacagcaagctaagttaaaagatcaagctgcaagaactgctcttaatcgtgctaaggctaaacaggctaagttacaggttaagttgttagaaaagcaattagagcagatagatactaccgcaagtaaagcaaaggacagcatgtctaagcttgataccaagactcttgaaaaacttgctaccttagatgaaggagttgattttagtgcaattgactgatgaacaaaaagcaggcgtagcccttgctgctagagaagaattagcgcgtaggagctatgcttattattttttgcttgcgaaccaagacaagcaggcaaaactgtttaattacactaaatatgtttgtgatcgtttgcaaaagatcgtagacggtgaacaacacaacctcataatttcaatgccaccacaacatggtaagtcaatgctggtaaccgagacatttccaagctattacttaatgcgtcaccctgatcaatcaattatggttacgtcttatgctgaaactatgtacaagagatttagcaaacgtggtaaacagcactttcgcgagtgggcaccccgtttatttggtcttaatttaggcttagctaactcacaggaatacgatgtcgcagggcattatggtgaagcttactacacttcaattcttggtggtggtactggtagaccagctaacttgctaatcattgatgaccctatcaaggatgaaaaggaagctgcgtcaaaaacgatcagagataatgtttggggtgaatggacttcaacatttagtactcgtttgcaaaagaatgcatcagtgattgtgattatgacgcgttggcagactgacgacctagctggtaggttacttgataatgataagacagcatccgaaaatgaaaagtttaactgggaagagattaagttccctgctattgctactgatattcctgctagtaaaactgatgaaattgggagacacaacggggaagcactcaatccagaactgcacccactaaatcagctattaattcaaaagcgaaatatcggcactcaacgtttcaatgccttgtaccagcaagcacctacagtacaagaaggtaaaatcattaagcgtgagtggatcaagttctatgtccctgaccgtgagactcagcaaagacttcatttaactgataaagaagccaccatcttaccacgacacttgcaccaaactgtccaagcatgggatgcaacgtttaaatctaaagaaaatgacgactacgtagcaggtcaaacatggtcaagacgtgatgcagaggtgtttttacgtccaggctggtgccacaagcggttaagctttacacaaacgctagacgctattaagtaccaatcaaccatttacccggaatcaacatcaaagttggttgaagacaaggcaaacggtcccgcaattcttgatactttgaagaagaaaataccgggaattatgccagtatcgccaggtgccgacagcaaagaagcacgttttgcttctgtgtcaccgtattttgaagcaggtcaggtatacataccgcaccctaaatggaaacccgaatcagaagaattgattgaggaatggtgtgggttccctaacatgccgcacgatgaccaagttgactctgctacttatgcaattaagtacctaatgagaaacaagcggaaaatatcactcggctttatttagaaaggaggtcattaattgtttggttttggcaaaaagaaaaagccagcacaaattacaattggcgctgactttatggattatgaaagtaaaggcgtaacacccagcagattcggtgatacgtcttcttttatttcaacaaggtatttagatagaaaatacaactataaacaagctgaccatctgtttaagtctaatgctttagctaaccgaatcgcccgtttaccagctgaaacagcaactcgaaacggctggcggatagtgattaataacaacgacgaaaaacaagtagtctatcaaacagctttagatgcattattgcctaaagaaaagattgctagtgaaattatttatagaaatatcattggagatgcgtatttaaacgtcaatgttgatgaaaaacaccgaactagcttagaacagccgttagacccacacaacattttaaaagtcaattcaatcaatgcttttagtcaaatgcatgtcaaagctaaccagatttgtaacgacccaacgctagaaaactttggcaaagaggaaaagctggtgcttgacggcttatccgatggttcagatgataattcaaaagagcctgaaagtatcacaattgacagtagccgctatagacacatttcgctggacaagatggaagacgatgcaacgggtgcatctttgctaatgcggtgctacgaccagattaaaacccttgatactggtttgtactcaaccggtaagatgctttacgagtacaacatgaaagtttggaaaaacgacgcctattttgatctgtctgaggatgaccggcgcaaaactgatcacagaatgagtcgcggtatgagcaccgaatcgttggtagttgttggacatgacgacgacctagaaaaagtttcaaataagccgggcggcattgattcactatttagttttgcttggcaacaacttagtaccgcaactgggattcctaaatcgattttgatgggtgaacaggccggtacattggctggcgcttcacaggacgtagttaactactacgacagtatcagttctcttcaagagcaggtaatcaagccacaacttgaatggttggttaaattgctgatgtggtccgaaaatgtgggcggcggttcagaagatccggactcactagattggcacattgagttctatcctttgcggagactaaccgacagtgaaaagatcgataatctcggtaagctttccacagcgttatccacagcaattaatggtggctttcttactactgatgaagcccacgatattttgcttcaacaaactactaacgaagcgattccaattcagttaactggcgatagtgccgatgatgacattaccgaccaagatagaaaatcttttgccaaagaaaaggctaagattgaaaaacatctcacaggagcaaaagaccatggcaagaagacgtaaaacaattccaaagacaagataccccatgaacttggaaaaatcgtatctgggggctttaaagcgtcttgtcttgtcatggaaaaaaacagcgcaatggtactccgattattatttgaagaattacatgttaggcggagcgttgtcgattgattcagatgatgatgaaaatgaccctcacaaaatagagcggttgtccgctttgattgcgttgatgatattggctataaagaattctaatagtaaacaggaacttgaaaatgttgcaactcaatttgtactgtcagtaaatagtttttcttatagcaatgtcaatgcgcaagctagggcaatttcatcacaagcaattgaaagcaatccgactattcaagcgtttatcaaagcaaagattaaggagaacaccgcttatatcacttcgatgcgggataagtacgtcgcccaattgcaaagcgacatttaccgcgcaattagtgatggtaagggtgccacggaattaaccaacgcaattgttaagcgtacgaatatgtcatataaccatgctcggctaattgctaacgatcaaacaggcagtattttagccgagttgaataaataccgcgccacacatgcgggctttgaaaaatatctatggcaatccatggaggatggacgggttagacctaaacaccaaatactagatcaacaagtttttagatacgatgatccagatggcggtgacgatggacagcttccaggtgagccgattaattgccgttgtgttgcgatgccagtaatagatgattagcactcatgaagggtgctttttttatgcagaaaggagccagaaatatggcagataatacaccaacaagtacaccagcaggtagtacaagcaagcccttaacgggttcacttttaaatagtgctaccaagccggttattgataagccaaccagttcaccggttatgaagccggttgaaccagcaaaggaccctaaaggaatgtttgattggtctgacgctaagccttacgtgattggtaaagatgaaagtttgtttgatgtcgctcaaaagttctctgtagctttacagcaacttagatacttcaaccacatcaacaaagcaacgatgaaggttaaagaaggtcaaacaatttacattcctaacaaaccggttgaagttccttacggtgcatagcttatgggcgcaattaggtatgaaactactacgccaatcgataaatttactatcgatccaataacggggtttctgcacgtcaagaatgtgccaatcacatgtgagggcgtacgaccataccgtcaattcgatgggcaacgaattcaagaagctaagacaccagaggaattgttctcagctgctacggttgattcagccaataacaaaccagttactgacgaccacccaaccgacgcaaacggcaacacaatcatggttaactgtgataattcccagcgatttatgaagggctttatgtccgatcatgcccgtgttgataaagcaaccaagactatcagaaatgatttgaccataactgatagtgacttaatcaacaaaatcaggcacggcaagcaagaattatcaattggttttcaaatgcagcttgatccaactaaaggtgaacttaatgggcaagcctacgatgctaagcaaaccaatatcagaattaatcatgttgcgattgtagaccgtggtcgcgctggtcactcggtaaggctaacggctgatagtgcagaagaaattcctgaagataacgaaaaaaagaaaggtgaaaagatggactttacaaaagtacataccaagcaaggtgatattagcgttgctgttgaagatgccgacaagttaacgaagcttgttggtgacgctgacgacagcaacagcaaattagaaaagcttattgcggagcgtgacaaacttaattcccaaattaaggagttacaaggctctggcgataagaacaaaaaggaagccgccgacgctaagaagaaggctgatgaagctaactcacgcgccgacagcgcagaagaagaaaataagaaactcaagtcacaacttgcaggggatgcattcgaagacagaatcaacaagaccttagcattccgtgaaagagctaagaaagttgttggtgacagctatgactttgccggtaagagcgaacgtgaagtcgaagaagccgctcttaataaaaatttaggcgaacacgattattcagataaaagtgacgactttgtaagtggtctttatgaaggcctatttagtactaatgctggtggcgtaagttatggccgtactgctggcgattcgaacgaaaagactgccgtagagaaagcacttgaagcacgtcaaaacttatacgaaggaggtaacgaataatgccattaccagttggacaactttatcaaaagaaagaattaggtaacggaactatcggttctttaaaagattattcaatttataccgttaccgctgctactaatatcgattatggtgttgcccttgatattcaagacaatcaagccgtagtagcaactaaggcacctatctatgcaatttcggttaagcgcgcttacgtaattggtcatagttacgatgacatcgaaaatgaccactggcttaaaggtgaaaagattggcgctttacgccgtggtagcgtgtcagttccaattactgaagacgttgaccgcttagatcaagcaactattaatgctgatggtacttttagaccagctaagccaggtgagcccgttgttggtcgctttatcactgcaggcgatgctaatggtaccgcaatcgtagatgtcaacttaactgacatgggtactactggcacaggcgccacggtagacaagccatcaacaccaacaactgatccaagtactactaatcaatcagccggcacatcatcaactaccggtaccgataagaagggggataaataatgccaaaagcaggatttaatacgggaactgcctatagtgaacttttcaacgttgttgatccggttgttttacaaccaaaacgagaagaacttcaaggcagaacaatgttccagctaaaaccgcttcccgatccatgggcacttacttacgaatgggcatggaaagaaattatgggccaagcatcagactacaccgaccgtgcaacagacatcactaccactgatgtaacttaccacagggaagtaggctatgttgcggagaaggcagctggattcgaatattcacaagctgatttagagcgttcacacaccggcggtagaaatatcgatattattaccgaccgtgcaaccgctactcatgacgcgttagcaaattgggaagacgctttaattttcaacggtaatggcgactcacaaagacctatttacggtttaactactaatgctgaaaccgcaggttatcaaactttagatgatccaagcgtaaccttgcaaaaggtagtagatcctaacaacaaggacgcatttagtgatgcttacaagattatcaattactttatggatgccgcttcaaagattactttgttgcctggctaccacaacgttaagccttacttagctttgccaccaaaggagtacgaattattaacccgtccgttggttaaccaatacaatccagacaagactttatggaacatgattcaacgtaacggggctaacagcgatggtgtatttgctggaattaaacctgttaccgagcttgaagctaagtattggaacaatggaaagggacaagcaggtaaaaagaatatgggtattgtttaccttgatactcctgatgttgcacaaattgttattgcaatggaaccacgccgttacggcacagccattccatcagctgacaacggattaagctacaaacaaatgtacatggaacgttcaggcggcttgtcagttaagttcccagccgcaattgttcagttaaccggcttgaatgatggttctgaaacatgggcagaagctaagacaaaggctaagtagtatgaatgacacaactaccacagtagagttaattaaaaagcttgatactgcgggcatgaccgatgacgtacccgatgaatcgcttgaagcattaattgaaaatgcccgaatgattgccgtttctgacgggttccctaaagttaaaaagcctcatggcgccgaaatgccagcccttgagttggctacccgtgctatgactttacatcttttagcaacccaggacggagcaggtagcggaatgactttcgaaaaagttgacgttcttgaaaaccattatgctgataccagccgcttgaagtggttacaacgctctccatggggacagctctattggaggctgtaccaagattatgtcggcaatcccgtaaaaattagaataatcgaacactgatgaaaattgaaggttataaccgtattccagaagtaactaaggaacttgactacttaaaaacgcatcaggttgtaattggtttttttggaaaacgtgaaagtagattactaacaatcgttggggctaacgaatttggagccacaatcaagcctaaaaatggcgagtggctatggattcctactaaagactgtcctaaaggaaaaggcccgaaagatattgaaggcttgtttattcctaaagggcaccgagtagcatgcgttaacgatcacggcaagttagtggcatatttctatcttagtaagcttgttcaaataccagcccgcccgtttattcggcaggcttatttagctaacaaaaggaagtacacacaattagtgcggagatatattgcaaaagttctagcaggtgaagcaacgggtaagcagctacttagccggctaggcgttgcatgtactgccgacatcgctatgtcatcaattaagttgaagcacccaaagaaccgaccagcgactatcgagcgtaaaggctcagacaatccgttggtcgatacgggtgagcttcaaagacaagtaaagttcatgatagtttcgatttagaaaggggggtttgatctaatgcacaaaatgaatccggcaagaatgattcacaagtacggtgtagacattaaagtttggagttcggggcaattctataaaccccgctatcgtggcgcacctactgatgcccctgattattcccaattaagcgatgatgatgctgaaaagcttcatgagccagttttaccaatgtcaagtcaccttgcacaactcttcgcccagttagacggcggcggagaagtgcaaggcgatttactttggttatcaattaataaatatccaattgaaagtgtggtcaatgttccgacacaaggcggctactacaaagttactagtcgatcatcttatgaaggttatacgaatccacacttttttgagtaccaattgaagggagtaaatcaggatgacacaaacccaaatgccaccaatgatggacaactacctagtgatataccaacttatccaggtagttaatcaaaaatatcattgcggtgtatatccgcaaatgaatgccggtttgcgtagcaattacccgtttattacttatgactgggtagaccctggaagtgacgttactttagacgaaactgatgtcatggaagtaagacttcaaattgatgtgcaagcaaccgacatgtatgaagctttgaatacggccaatgatttacgcaagacattagcgcacagttacggatatagaggattttttaaacaagcacatgtgattccacataacgtatcaggaacaagctctcgaaatttctataatggcacgcaattacccgtttatagatttggtttcgattgctcgttttctatttaccgtgctggaactatctataaaccggaagaccttaactttgaatttaatgaaacaacgattgaatcaattaaggctatgaatcaaatgacaggaaaagaaataaacgtaagaaaggaagaactttaatgccaacattaaccacggtcgccccttacgaccgccctatggatgtgaacgtcattatgactgtcctacatccccaaccaattaaggggctaggtaatattttgctgttaaatgctactactgcagctgctaacagtgattcagctggcaaagacgacaaggatggcgcacaaaagacaccagctcaaactttgccagatactttgtcaaacaccgaccgcttgaatggtttgcttttacgtaagactgacccagctactggggcaatttaccgtgaatataagaaccttgatgcggtggcagttgactacaaagaagattcggctgtttacaaaaaggctacagcctactttgctcagccaaagcactcagaccgcttagccgtcttagattatgacaagtcaaaggcttacgatagtttgaaggctttctggtacttcaactggacttttggcgtatgtgtagacaacacaattgacgattcaaccgttcaattgtcaaacatctttgaagtaaacaaagatcacttcttagttctccaaactgaagatttgtccaagtttacccaaatgatggggcaaaactacactatcggcttgaagcacgatttgaatgagccaatggacgccgcttttgtcggtggcattgctcttaacgatgttggctcaattacttggaagtttaagcaacttgaaggcattacgcctgaaaacttaactagtcaagaattggctggtattaacaatattcatgctattgcctatgaagaaatgatgggcaaaggtcaaacctcagagggaactaccttatcaggtgaatatattgacttgcttcacggtgtgatgtgggttcaaaccgaatgtcaaagccgcttgcagaagcttttgcaagataacggcaagattccatatgaagctcaaggcattgccatgattcgtgcagtcttaacacaagttttgaatgaagcgtacgacaagggcatcatcatgactgacgacactactggtcgcccaatgttcagcgttactaccactccacgtagtcagcaatcacgccaacacttgtcagacagattctatgacggcgctagctttgaataccatgcttcaagcgctattcatactattaccgttaatggcgttgtcgattcagacactatcatggctgcttaattagaaaggggagtttaaatgccttcaaagattaaaacatctaaaatgcgtgaatatgatgccaatgactgcaccattatgatcaatgacaaattgatgtatggattttcagaaaacagcatgtttacggttactgataaaaataatgcgaatacgtacaagattgatccacaaggatcagctactaaatcgcacaataacaagactatggcgggatttacattgccattagatgaaacatctccttgcaatgcctatcttttagacttgtttaacaaggatgaattttttacagttgacatcattgactcaacatcacatatttcttgtcattatgcatcaattgacaagatcccagataagcaaggcggcgcacaagccggtgaccgtaactggcctattacaatgcttaacaaagaagaaacttcgaacatgacctatatcgattaattcgaaggtttcaagagactttcatgaaatcaaattaacttaaaggagacttaataatgagtgaagaaatcaataacgcaaagcttgccgaaaaggcgcacgaagaacaaatgaagattaaggaagaagcggaatcaagcaaggttacacctttgactgctctttctaagaccgtaaccattcgggaagatactgaccaagaatatcaattaaagcttcaattccctggagttgaagaagcaactgaaattctggaaaattcccgtaacccgttcggtgcaattaatcgtccggaattgctgagagaaagcttgaagcacgtgattatccaaccaaagattaagtcaattaagtggtggaacgatcatgaaggtctttatgaagccgccgaagctgttttgaattttcttactgaaaaactctagacagaaactaggtaatagagaaattgaaagacaagccgattatgttgaactccctctgcgtttgataatgcacgggattcctgaacggcttgtaaaaaatgctacaccagatcaattattgattatggcaaaggtagtagaacgggacatagaaacaacaagtattagtcaagcaaatcatatcggtgaattgtttggcggtggtgataaatagaggtgatgcctgtcaattaaattgatgggtttttattttgcctgaattttaaagaaaggagctgaaaacgtggctgatatcgaacatctaggaattggaattaatacaaacgttgaatacaattcgctaaaagaagcagagcaaacaactagaaagtttatttccgacctcggtgttttagaaaaacgctttgatcgtttaaaggctcctgactttaccgaacaattcaacagaaacagaaattccgttgaagagacaagtcgtacagttgctggcttaaaaaagcaactaggcggcatggcaaccactagtggtcaaaccaccagcgaagtcaaaaagcatttagaagaaacaaaaacttcaactgatcgattaattgatgcaaacgtaaaattaaagtcttcaattgctggtgtcggtgattccgctaaaacaatgggcggtttatccaacacaatctggaaagctggcgattctgctaagactgcttcaaatggctttaatacggcaaaagatgctgttgagaagacaaatgggacgctaaaaaacaacagatcagccagcgaccgtgcaactacgggctttaatttgcttcatgatgcgggttcaaaattaattaccgttggaacaggcattgcggcggcaatggtcccagttgcagcggcttttaagaatgcaaatgatgaagccactaagctagctgacgaatacaacgttattaagaacctgcagcaaactggtggagatagtgccgctactgctaagaaaaatacggcggctattagacgtgaaaatgctgatttatctacaaaatatggcgttgatcaaactgagttggcaaaggggtcagaagagctaattaggcgtggttattccggaaaacaagatttagccgcacacaagtatttcgtacaagctgctaaagcgactaatgagcattatgatcaaattgttaatgccgccgctcctatgcttgaacagtttggctataaaaagcgagctggtaacagtactaagaagatggcacgttacacacgggaagttttaaacaaagcggcttatgtcggtgacatgacatctggtaaagttggtggtgaaaacggatttggtaattcttttaaaatgtccggttcaattcttcaccaaacaggtcaatcactttcgtcatcattggctgtacttggtactttgtcaaacttcggtgaagaaggcacctctgctggtactggtgtaaggcaagttgtctcgagcttaattggtgcttcgaagagcaaaacaaagaccgcggcgctaaaagatttagggttatcgcccgctgatttctttactaagtcgggcaaattaaaacagttgcctactgtctttgatatccttaaccgagctacgcagggcaaaaagtctaaccgtgttactggcgatttcaaacagttattcggtcaaactggctttaacgacgccctaattttaactaaaaataatcgtgatattgctaataacgttaaggatgctaatagggctgatagtacaaattacattactaacttatctaataaaaatatgaagtcactaaaaaaccaaatggaagtgacacgacagcttttaaagcaagttggaatgcagtttgcccggcaaatagcacccggtttagctaatatgcttagattagttaacaaggtcttgcaagccatcaaaggatggcctacgcctgttaaaaagactttaggttatatcactgctattactggggcattaagtactggctttgttgctaagaggctagttggtaacgtacttggtattggcggtaagactgtagccaaaacagcggcaaaaggcgctggcgaagaagcgactaacccgtctcttctaggcggagtgggttctgctataagtaaagtcagttctaatctaattggtggcaaacttgcgaaaactggattaggtagcaaagtagctggtaaattgggcggtactgcaagcacaggggctactgctctagctggcgctggcgttgcgcttaattctggtattgatctttataaagctatcaccacaaagaaccctaaaaagaagtttgaaaattatggtaagtctataggttccgcaattggcggcggtgttgggctttaccttggtggtccagctggtgcggctattggctcaacattaggacaagtagctggtaaatgggctggcgatatggcaaaaaggtttagcaagaccaagtttggtaaagccgttggtaagacgttcaagcaagccgtatggtcaattaagacgacttggcacgatgcgggtatgggcaaaatgatcagcggcactgtcaaaagtgtaaaaagatcatttggcagcatgacccgtgacattgggcgagactggcgcgaccttaaccgcaataaagactttagaaacttcaaaaacttcttaaaatctggattaatggcttcactaaaactcgttattaaagagggtagtaccttaattaaaacgggaatcggtgttgttcgtggagctgtcaaaattgtaacgtctaacatcaagggtattgtcaaaatatcatctggcgttgtcagaacaatatctgatattttccatggaagatggagtaaagtctggaaagacatgaagggcgttgcaaaatcagctattgacatggttactggaatgctatccggtcttaaagacatgtttagctcagttattggcggtattgcaagtagtgtcaaaaatgtttgggattttgtgtcaggtaaagactggaagacaaagaaacctgaaaatagcaccagtgttgcaagtgctaacaaatccgttaaagccatgcaaaacggacaaggtggtaaacatcacgccagcaagtcacatgctactactattgctgacattaaccgctcgactcacttaggcgctcatgctaacggtactgcttcattagttggtgaagcggggcccgaattagcttacaagccttattccaaccatgctcgtttgcttggcgctaaaggtccgcaattggcaaatatccagtcaggtgaaaaaattctcaacgctcgcgacaccgcaaaggttatgagtggcggtctcggtgctggattaaagctcaagggatatgctaacggcaacgctagccttggtaaaactaccaagaaagttactgatgactacaagcagattgcttctaagtcgtccaagtcacttaatgatcttactaagaagagcaattcaagctggcgcaagattacaagcactaccacaaaacaagcccagaagagccgaaaaggggcaatagacgaatacacccacatgcggacaggagttcataagcaaatggacaagatgcatgacggtgtagttgatcttgcttctacgactgcaaagggctttggtaaagagctaggtcacatgaccaagtacgctcattctgcaatgggcgacacaattgaccaggttaattctggtattaagggaattgatcaagttcttggacagtttggtggtaacacgtcagtcatcaagccagttaagttcgctaaaggttcaaatgggcgtttgtcccaaaacaccatggcaatggtcaatgatgcgacaattggaccaagacaggaagcaattatcaaaaatagcggtgatatttggattccaagagggaataacaggatattgccacttgaaaaaggtgattctgtcctcaatggttctcaaacacaagaattggcaaattattggggattacagcgttttgcgaaaggctctggcgtaagtcatagcagactaagaaaaatcgctgagacagctggaaataatcctgctaagagttttgctgatatgtacacttcaaaaattaaggcaagtggtacagatttacgacaaggctctattaatttagctagaaattcatcaactaagttaggtaatccatggtctaacgcaatgtgggccgtcattaacaacgcaattggcggagctaatggcaagggcggaacccgtgaaggatttttaaagtacgctgaatcaacattcagtggcgttaagtaccaaatgggcgcggcaagcaagacgctatccgactgttcgggtatggtcatgcaagctttacgtcactttggcgtagatattggacgcacgactgtggcaatgcaacacagctcaggtgttgaatacctaggtaagtcgttatctaagacaattccaggtgacttggttatctttggccatggaacaggtgccgctggtcacgtgggaattatcaaaaacccacacaccggaacaatgttcaatgaaactccgcctcatgctcgtgtcacttcgattgctgacgacaaggggatgggctacggctattaccgtgttcgtggcttacacaacgccagtcaagccaagaaaacagcaacagcagataaaaacttgatggctcttgcaaagaaagaattaggtaatactgctttgagttggatcaagaaaaatcttagtgatgatcttggttcattaggctcatttagtgttggcggtgacttagctgaaagagctaaagccctagccggtggattgaagcaacttgaccccaaagcaaccaagaatggtattgcagccgttttgggtaactggaattttgaatcaggtggtttaaaccccggtgcagttaacagcagcggtggtgcttccggtttaggtcaatggcttggcggtcgtaagtctaacttaattgcttatgctagacatcacgggacaagctggaaaaacgccggcacacaattaagctttgccgttaaaggcgaaggctcagacagcgctattcttcgctccgttttggaaggaactggtagcgttgccagcctagcaaacaagttttcatctgaatgggaacgtggcggctacaacgctcaacacgtcaaaggtgccatggagatccgcaaagttcttggatacgctaaaggcggcgatcctgtcgttggcgacaaggttttagttggcgaacacggtccagagcttgccgaatttaaagattcggttcacatctactcaaatgaaaagacgcggcaaagattaaagccactaacttcatctaagccaaaagtacgcccagtaagaggaactggcggggctttaggtggcattcaagtaaccgtaaatattaacggcaacgttgatggcgatgatgctaaattgcaaaaattagcgaagatgataggcgtagaggtagatcaacaagtacgccaaaagttaaatattattcttgatcatattggcgatgatacgggtgatgatgacgatttcttatagaaatgaaggtgatgctaatggttcaagcaactaaaccaaaaaagagaacggctgaacaaaaagcccatgactctatgaaatactgggacaagcggcaaaaacatgaaggcgccgtttaccgaaaaatgttttcaaaggcgcagggctatgacttcgattcacattttgaaaagaatcaaattaaaaagaaaaagcttatccgaaaacgtgataattgtttgaagcttgttgatgccgcaaacaaaaggaaaaagcaagcggaaaacaattataaaaaagcgaaagacaagtacgaccgtattgttacgcaaagaattgatttaagtaataagttggctgaaattgcggagcacaacactggctggaagaatgagggtaaatgtgctatttatcgttcagacggtaaaggcgaaattatctatatttcgccggcagacggtgaaagtgaaaatgtttcttcaaacattacttcttatccggttgatgaaggtgcaccatatagctcatatgcccgtgtaaacagcaaaggggcaacagtagctggcattattgtaggcaaggataaagccgattcataccgcaaatggcacatgctgagtcaatggaatagctcccatattcggttaacctaccggggagatttctgttacaagcactacctaattgcaaacatgaacaacgactataaaaatcttcgagataacattgaagtttcacttacttttcagtttgtctatcaagcaaaaatcaccacttcaaacgatagtaagcatcacagaaaatcatctaaggcttctaaatctgtcgcaggtaaccgaaataagaagtacacagctatcactattaaatctggtgatacattgtgggctttgtctaagaaatacggtagttccgttcaatggatggcacgagtcaaccacattaagaatcctaacttaatctaccctggcaataaaatacgggttgcgtaggcggtgatttagatgagaaattatcttgatgttgatgttaaaaatattccttatatctttcaaataacccttgtgggcgatacctatgatatgagaatagattacaacgaagttgcggattactacacaattacaatttggcataacaataagaggcttctaacgcaggagcctcttttgcttggtcaattagttggtattgatattcctgatccagaattgccacgaattgacattcgaaccatggacgaaacgggtaaggcaacagaccaaggcaagggaacatttggatatgaggtccgcttgtatcttgacgttgttgacccaaacggatcagaaacagaagatccatcaattaaaccgctgggttacgaccctaacgaaaatgatgacgacctgacggatgaggaggtgtcttactaatgatcgttactaaagatccacatatggaatttgtggcggttgacagtaaaggacacaagcaaatcgtatataacgatgaaacttacgaacataattatccttttacgtttgaagtcccgtttactaatgatcctgtcccgtctacttttacaacaactattttcaatttaaccaagcaacataaagacttttataaaaaagggatgcactgctggataaattttaactggggtaaagaccctaaaaaaatagctgaaggatttatctctaatacgggtaaattaagtaatgatgggacaactgatagcaaagttttaacttttactgaaggcacaaactacagcaatgtagctgctcgaaagttgaagctaaaaaagaataaaaaggttaatcactacaaaaccgttaaaatcactgaaaaaggtcattacaagaatcagcgttatagtacctcggtcgttgaaacttacaagagaggtcctaaaaaagggcagaaacatgtagtccaccattgggcttatcgaaaagtatgggttaaaccaaaaactacaaataaaagggttaaaagccgtgataataagacttattttgctaaccgagtttaccgaaaaggaacgacttataagcaagtaattgaaggaatagcggaacaagccggtatcaaaatagctaaaatcgatttagctaaaaatgaaggaattaaaaaatcctttaccgctaaaggcaagccgctaactttaattaaaaactttgttaagttagcaaaatcggaaatgttttatgaacgtggcaagctcgtaattgtcaatcctaatagcaagaaaaatacttggtttgtgattgatgataaagacttaattcaagttccatcgcaaaacgatgatgataaaaacgggacaacttggcaaattgttacgcccttagtcccagaagttaccgttaataccggcattatcatgaattctaagttcttaaaaggaaaatttgtcgttaaaaatggacagcatagttttgatggcgaaagtccacaaactcaatgcactattgcggcggttacaaaagctaaggctggtcataaaacaaaatctaaaagtaaaggcaagaaaaaaagtaaatctaaaaaataagtcatgtggtaataagtcaaatgaaaggcgatgatatttgttctttttgatcataaatttgagtatatgaaactaagccttggtaaaggttgatttttttaatgttaaacttttgtttacttttaaatttagaccaatttttgaaattaagacctcggtgtcctgtacagtttgtcatctttgagcaatttaaagataactcgtactaattttcttgcagttaatgtgcaagcacgtttatgcggcgagtagacagcttcatcatacttcttttggtaatattttttgaaaacaggatcatgtaatcttgctagattggcagcttcaatcaagtaatatcttagatatctgtttccagtcctggccattggagtatgttcgttgctgtgatctcccgattgatattgattccaggttaggccggcatacttagccagctgttcttctttatcaaagcgatcgatacttccgatctcagcgataataccagctgtataggttttgccaataccgggaattgattccagaattttgctttctggtaatgcatcaacgatacgatcaattgctttttctagatctttaatagattcattaaagctttgaatcatgttgtaatgaacagaaagcactgcatcaattgaatcagtcattactttgcctaagcgatatgaacctctaacagctttcttaattgctttagccaaggtatctggatcggaaaagcgtcctctgcctttaacctgtaagtaagaaattaagtcttcggtaggcatatccgcgatctcatccagagttttactatcggttacaatagacatcattgtagcaccgaaaagaggagtattaatcttatctttatcgacagtgattagtttattaacccgataatataaagcttcaatgaagtgctgtttggtacgagtcagttcttgaactaattcatatctggtacgcgttaaacgctctaaagcaagatagttgtcttgtctggcaatgcttactcgataatgtccaaagcttagatacaaagcaatgtaataagcatcgagaggatcagttttactttcttcaaagactttatgaaacctgctggtttctttggggttaattacatcagtctctacattgagcttttgtaaatcttcgtcattttggaaaaagtaagcaggatgaaaactgtaaatagatgtagcttccatgccaataatgatttgatcatagtgtttattttgagctagatctaaaatttgttttttcagttcactagcaccataaagatcattgacaaagctatcgttaattaagcgtttgttttgatcttctgaatcaagtgcaacgacctgtaaatctttagaactaacatcaataccgacaaataatttcattggaaatggcctcctttctttcaaatttctgatcatagattttgatcttcacatgttaacccctaattacagttcttaagttcaatctcgccagtataagtattcactggttgcttctttgaaagctgcacctaatcccaattgctcaaggactagcaaaaagaagcaatcaatacagcatgtgagttagagcataaaggaactgtctgggtggcagacttataaagcagacaaaactgcaggaggtgataacctagaccagttgaccaaagccaatgacaattagaggctaacatgtgaagatcaaaaagcaaatactaatttgattaattatcacaatatgactaattacaatttatataatacgaggagatgacagtatgaaacaaaaaaatagggttccaattcgatggtatgaaaacattagtaaggtgaaaaaccgattcagcagaagtcttgaatctgcttttttagctaaagttttaacttacgacaagaaaaaacacattgcagatattcaaccgctggcgaattggatcgatggcactaaatcggctcagtacttagatgttccggttgccgaatcttgctataggcttgatgaattgttagataagtttaagtcggatttaaaagccgttgatagtagcccagaagttaactcacattttttagaacattatccgaaaaagaagtctatgagagttggcgctgtagtgatagccgctgctatggaccgtgacattgataactgggacggcactgggaacacctttacgccaaataccggcaggatgcatgatgcaaacgactcaattatcgtttctgtttataagggtgacgacgatggctagggacctatttatgagtgataatcatgacctagttattgatccgattactcacgatttagaaatgactagcggtcttgacgaaatagcgcaaagaattaaggcaacgctagaaattcgatatggcgaaatgcaacggctagaccctgaaatgggcgcggattatagcagctttttaggtaaaaacttcaataagcaagcggcggagaatgatatgcgagcggctattgaagcaaacgtaccggaagttgaaaccgttgataatatcgaatttatcaagaaacctgaaagaaaaatgcagattaattttagagccaccgcaaatattggtgaagtagagggggggttacaagttgacaactgattttggtttaaaagaaaccggttatattgccccaagttttgcggaaatcttagacggtgttgaagacgattaccgaactagattaggggatgatattgcactaacaagtaatgcttatctaggaatttttgcccgtttaatgagtgatgcgtcttatgatttaattcagcaacaggaacaaatttactattctggattctattcaaccgctgtaaattcagcattagaccgattagcgggcaatatcagtttgacccgtaaagttgacgctccatctcatgcggaagtagtaataacgactgaaggcgaatatttaattcaagctggcgaaaagttcgaaacagaagacggcttggtatttgacttaacagaagatgttatcacttcaaaacaaagcgacggggcttttcaaggaactggaaacgttgaatgtgaagaaactggcgaatttactaatgtaccagctaacacaattactttgtttgccaacccagatgaagactttatctctgtaaccaacccacagcctgcaggcggcgggcaagattatgaagacgatgaaacctttagaaaacgtttaattatggaaaatgtcgcccgtcctggtcctacagaactaggtattaaatcggcattaatgaacctcaacggcgttaagcaagttggctttattgacaacgacaagtataagacggatgaatacggtaatcccgaatgttcagttcacatttatgttttaggtggtaacgatgatgaaatcgctaaaactttagttgataaatgtgcggccggtatcaccttagctggctcaattgttaaagaagcaccagatgcaacaggaaaggttaaagaagttaaatttaaccacgctcaacaacataacatttacgtaaaggtcgatgtttcaattaatgacgactggaacagtgatgcgggggttgatgacatcaagcaagctatttgcgacgaaattaatttccttgaaatggggcaaagggtcaattttacccgtctttattctgctacctatgacgttaacggtgttgatgatgcaaccattgtaattggtagtactaaagataaattagcagaccaaaatattttaattggtcgttccgaatttgctcattgtgaccctgaaaatgtggaggttgatttaattggcttatgagacaacagatcagctgatcgcggaagtagccgaccactggaacaagaaaaaagataccgttttttaccagctgctagacagttataattcactgcttgaaaagatcagtgatgaaaacgaaaaaattgcagactggcgaagcattgacaaggcaaaaggcacaacacttgatttaatcgggcaagattacaaagcttatagaattagtgatgatgatgtaaacattccgtttcatcatttttttacacattttaatttctagggctcaaggcacaataccatcaatggttaaaattctgggaactgccctagatgcaaagccggaacaatttaaagtctataaaaccggccttcgtcatgttggtatcgaaataccgtgggacaatgtgcaaacacttcaaatgcaaaaatttatcataaagaacattcaaaatctattggcaatgggttactggattgatgagattgttttttatgtaaatgttacaactaccgagtacattggtgccgcttcaattgatgaaacggatttaaacattgatgttggttccagctggtggactggctgggaagagtcgcaacagaacacagaatatattgctaccgctgtaacagcggaagacgtaaatatgcatcaggtaacaactacgtggtggacaggttggcaagaccaacaaccatgtgaatcttacattggtgcaaaaccattggttatcgtttcttacaaaatgatagctaattagaaaggaaactatggatacaacgactagtaaaaaaatgaatcaggcgctagttacagatatagggcgtaatttgttttcaaaactcggatcgggtaaaggcgaaatcctttataccaaagccgcactttatacgcaagatttaagcggaatgaccgatgaacaaattagggctttgacctctttagctggcgaaaagatgacaaccggcattaaggtggctgacatctcaccggttgataaagaaactaaacaagtagacatcgaatttgcattttcaaatcacgatttaaatgaggatatcaattttaagtcgattgggctttacgcaaccattgatggcggcaaagaagaaattttagtcgcaattattccagctattggtactgcaacacttggagcaggttcgccagatcacacatcaacacagctaatcaagcttggcgttgcgtttaaactcggcgcagctgccaaaattaacatcagtgtaaagcaaattggcgtagtttatgatgaagatttagacgcagctattttgaagcttaaagcggagtatgacccaaaaattgcagaagcgggcaaggttaagggtgcaaagatcaacgacggagcggttgttgaacccgacaaggacggcattcttgacttgatcgttgacagtgaccgcattaaggacattccagcaggagtgacagatttaaacaatctgactgagtccggtttatatcgcatgccgaagaatgcgaatacctttgctaatagaccacagttggcctccttatttttgcaaaacagcttcttaaaagtaattaatgacgttggtaaaactaatactatcattcaaattttagtttctgccatgagtggggttatttttgcacgtgggatgcgtggagataccaaagcctggttcccctggacacgcattacaccaagtaatacgttgtctaacgatgacattactaacatgatcaaatccaaggtcgatggcttgaatgtcggtcaatttgtgaaaaaggttaatggcttaacccctgacggaagcggcaacgtaaacgttacctcaaccgttgcccgtggttttgatgctaacgcaaacgctacaactaagatgacggaagaaaacctacacggcggcaatcagattctgatggatcagaatgcaggtcaagacattgttaactggaccaagggacaattaaacggcaaactgtccaactctggtggagacatggcggaacatagtactatcaactggaatggcgcgggcgcagttgaatcgcatgacggtaacattggcgggttaacatggagtggcgctactgataatgtcagactgtttgcagataacgatgctaacgacaacttagacctggttatccagctgggggacgataactctaatgccgttgtaattcgcaatagcactggcgcacaggcagctcgcgttgatgctagcggtaatatttccagtccaacgatcaacgatttgcaaagacagatcaacgatttaaaggaagacaatgttaacaagcaaaagcagattaacgatttaatcaacaatgtaacttacattaaggacaactacgtagagggtcgtcgcttcccagcaagtcaagaagcccaagcccaagcctgggaaaatgagaagcctacacggttggctatgattgaaaagtaatagaaagaaggtgaaagcatgctagaccatctaattttgaatacaaaaaagtggtttgaaatttcggatagtgatacttcaattgttgccaatggtaaaacatggagcccacatccagcaactgtgaccgtaagacaaggcggagtaatagggggcgctaatggaagtgctatttcaattggtagatctacctttagatgtgttggcacggctaacaattactatgcaataactggaactgcaaatcgtaatgggcaatgggaagatttgccagacacatttccaatatatttgtcttgcgtttcagcaagtgacgttgaatccgtaaattggggggggtaaattccttcctattcgtttgtatcaacgacttagatcacttctttacctgcttagggaggtggctctatgattgatcatcttcttttaaatcgtgaaaaatattatctacaacaattattacttgatgattatgtaaatttgaaattaatcggtaaaactgttactcgtcaaaaatatcaggtagcatgggttgatcctactggttatgatgtacaaatttcagatagtaagctacataatttcgatataccttctggtatattgaatttggcctcaacggggactattactggaattattttaagtagccaaaatattccttattacagtgtttattttagccattggattaataatatgggaactgatgatggaatatatagaacttacataaaagcaacggatattatgaatagatatttgttgagagaggatttatagcactcattgagtgctttttttatacaaaaaacaaccttgctcacggggcgttcccgtgggctttttatatagaaaggagccaataaaatggctgacgaaaatacacaagttgcaccagtagcgggcgccgaaacaaacgctacacaagatcaaaacagtgttgctgaacaagaacaggcattaaaggcaaagttcccaactcttacaggctttgtctacttgtcagatcctgacaatgcggatcctgtttggcatcacaaagtaatcccagtttttggcgatgaagcaagtgtggcgctcccatggcaagtccacgccgaaagaccatctgacagctttaaagacccagtttggacagtgggcgccactgattggagcgagaacgacaaggacaatcaagccgttatcttgcaagaaactacacaaaagctggctgaattggacaagaagagtgctgaactcgacaaagccaacgataaggtagaccaagcattaagagatatgcaagaagttcaagctcaatcatctaagcaaaacttagctttgatgaagagctttactgaacaaactcaaaacactaatcaaattcttggtgctatgcaaaagaccttagcaatggtaaccaaggcagttggcgcaaatgctaataacgctacaccagctaacccaacaactgataagcaatagttaaggaggacataaatcatgactttaatggaacaaattcaagcaaactttttagaaatgtatcgtatggactgggaattcggcatctatgataagaacggcatgaaggacctagtagtacaaggtttcttatcagttgaaaattaccaaaagattgtaggcgaagcttatgcgccagctactgcaacgcctcaacaataactcactttacgtgatcattagtctgctgattttcggtaaaggtttgggcttttaccttaaccgcagatttttcttttatccaccacaactagcgtggatgatgaacaacgtttacttagattgttcaatgatgattgtaggcattgcgttgctggtttacacctgttcacggtacaacaacaataagcttctaggggtgttgttggcacttgtcgtggtgctgctagcaataatttcatcaatcgaaattgaacacgtgatttttgcccatgaaatggagtttgtccagaacgctttgtcaaatacggcggttatagcctttattatctggacagcaaggcattattcaaagcgttaggggtgatatagtgcatgtcgacctaaacagcattatatcggctttgtccgctttgcttttaggctactttacctttaagcaaaacggtaagaaaagtgatatggatagcgtggagaataaccgagattacattgttgaacagaataagcgtttaaacgcggaaaacaaaaaactactcaatgaaaatgaaaaactcagaaaggagttaagtgaaaatgaagccaaacactagaattttagattacgttaccttggtacaagacggcgttttgaccgttgacgatgcaccacaagacatcaaggcagaggttactaagtgggttcgctactttgcaggaattaaggatgattcaatggttaaggatcctgaaagcactacaccagcaccacaagtagaaaataagccagatactacttcttttttaactaagaaggtgactgactaatgaatttaagccaacttaatgaatatctttttgtgggatttcttgcctttgtcgctgtatgtcaaggtgtttctactggtattgatttctttgcgtctaagtcaaagaagcctttaccaaaggaagttatgaccattgaccagattgccaagttcgtagtaagtgaagccgctacgctcgacatttcaggtgctgaaaagaaagctaaggcggttgaagctttgctgaaccaagcacaaaaggaaaacaagccccttaccgaatccgtagctaagggagctgtccaacacgcatatgaccaaatgcaagctgatcaagaaaaggctacacaagatgaagatgacaatgctcaaccaattggttttgtaagcggtgatgattctgatgacaaagactagatataagacgtacaacgagtacgtttttgaatcttttggaaaatcgtttgaaaaccaaacgattgccaaaagaaaccaaatgaaaggcggtgaaaaagatgtcaaacttaaccgtatcaaaaagaagtttgggtgctgatgtcgcaagctaccaatcagaaaacgtaagctacgccggcattaaatttgcattgattaagcttacacagggcactggctatatcaacccaaaggcaaaagctcaaatcaagagttcacttgctcatgggcttttaaccggcggctacttttatgctacacactctggctctgtgtcattggcacgggcagaagctaagtatgccgtagaaaaggctaaggcttatggcgtcccagctggtagctacatcgctgacgactgggagcagggcagcggcaacgacgtcaacggctctgtcggttcaaacaccgatgctgtcatagcagctatgcaagtgatcaaggaagcagggtataagccacttgtctatgctggcgcttatgttttgcgtaaccggctcaacacagctcgaattgtaaagtcattcggaacttgtttatgggtagcttcatataaagtcatgggtcgtcaagattccgctgactttaattacttcccatccatggacggtgttgcaatctggcaatttaccgataactataaggggtataacgttgacggtaatatctgcttgatcgatttaaaggctaattcaggtagttctaagcccaaatcaacgaacaagagcgtagaatcgctctctctgcatcccgttgtgaagtggaatattggtgctgtcgcagtagtatctaattcaaaaggtgcttatgtctacaccagttcaaagttagacaagcgggaatctgacaagctaaaaccgtgtggctccatgtggcaggtgtttggcttggaaaatggcgctgtgaaggttggcaagaaccaatactttgacggtcgtgccgtttacgtaaaggctaaccctatcgcatataacgactcaaaacacgctgtcgctaagattgttctgcctcacacccacgccctggacgcaccaaaggctgacgcaggcaaggtctacggcttgaagcttaactcaaaagtcgagatccagggaagagtcggacgctttttaaagattaaagagctacacaaaggcaagcaggtatatgtgacaggtaatcgcgcttatatcgtgctataatcgtaaatgtaatttatattggacaataaaagagctactttgggattaatttcctgaagtagctctttttttgtgtttctatgataaaatgactttatcgggcagaatggtgcctttatatgtagctttaagcttctatgcatataagtattaatgaagtgaattaaaatgcattttaagagccactctggaggataaaacctctggggtggctctttttttgtgtaatgatataataaaaagagcagtggtattacccacttgctctcttgagttttacttcataaactttttaatgatccatgaagcaattacagtggctaaaacacttgaaaaagtagtagccacaaaagctgttatagacatgaaagtaacactttctaggttgtgataatttggaattggttgggttccacacaaccatttatattttagcaaattttaaaataagaacaaaatattgaaacattgttcacttttaatatataatagtggtggacatgaaaggatacactttcgtttaaagtcccgaagctggttactttgggcatgtgtctagccgtctagtcggtgtttgttgctcttgctgtgccgcaagggcttttttgatacttaaattatcagttttaaatagcaacgaaagagccactctggaggatttgtcctctggggtggctctttttattgcactagtatatccgaaggtatatactatagttgcaacattttcaaggaggtttattaataatggaggttacactacagaaatggggtaattctcaaggaatcaggttatctaaatcattactaagagaaattggaattaccacagaaaaggctacattcgaaattgaggttaagaataaagaactagttttaaaaagaaaaaaagaaagcaagcttgctcaacgctttgaaggctttgattataaagcttactggaaaaaatggaataaggaacatcctggtcaatctaaagaagtagattggggtaaacctgttgggaaagaaatttcttggtaaatatcaatacttagaaagggggtgattttttggcaattgatattcatcaaggggatattattatcattgattttgacccaagtcttggacatgaacaaagaggtaatcgtccagccttagttgtgtcaaatcatgattttactagattaacgcagtcacttgttaaggtagtacctattagtacaactgataatgagttcccattgcatattcctgtacctaatggattgaaagttcatggtgttgctgaagttcagcaagaaacaactttggacctaagtgcaagacattggcgtaaggttgatgaagctcctaaagctttcttaaaagaagctttgaaagcactcgaagaatcttacgaagaggaataaaaaagccgttagtggcaaaaactaacgacaacacaaagcctatatactgatctctgaacaagatttagtatataggcttttaatttttttgtcaaaattaatcaatagttgtgcaataagccacctcgggggattcgtcctctggggtggcttttttgcgttatattttaatttttattgcaaatgtagatacaaaagtatttactaaataaaaaggtttaattaagacttgtaaggagatttataacaatgtgcaatgtggaattgaaacaatggggcaattcactagccgtacgactgcctaaaactattttaagcaaagccggcatcaatgaattaccgaccaaatttgatgtaacagttaacaaaaataatgaaatcgttttgaaaaaacaaaaaagagcctgaaagcttaaaagagcttttcaaaggctttgactataaaaaatattggagcgactgggaaaaagaaaatcctggcaagtccaaagaagaggactggggcggaccagttgggcgcgaagtcttttaatttagaagtccttattagaagggaggtgataatttgaacagcagaaaagacttccatcaaggtgatgttatcatgatgaactttgacccaaccaagggacatgaacaagcgggctatcgtccagcgcttgtcgtgtcaaacgatgatttcaatatgatgtgtggaggagtgatcaaagtggttgctattactactaacgaaaaagaatttccactacacgttgaaattccagaaggtttgccagttcacggcagggtagagctggatcatgaacgttcaattgattctcggtcgaaagccagagaatgtaagtatgtatgcagtgtaccgtctgaatttttagatgaaattctccgaaaacttgcattaacttataaaaaaagccactagggagtaacactagtggcaaattaaagcttatatactgtctatatggttagattcagtatataagcttttttggtgcttgtaaagtcgcctgattttatagatagctttaaggcggtccaaatcaaacgctaaaaaattggcgtgcagatcctgaaaagttaaaaaatagcatgggagagggtacacctactagctaagttgcatgatcttagaaaactgccaaaatgagaataaataatgtgctataataaattttggttgcaatgcagaattttcaagtcgatttgacctaaacaaaaaccgctcacagtttggttgtgggcggctttatttttcacgtaaaatagatgttaagagccacaaagttttatagggtctccgaaaaggtctccaatttaaaaattaatatgaattagtaaaaactaaaaacgcataaatctagaaaaaagaaccggaaaaaattaataaaaatcgttactaaatccctcacattccgtaaatatatatgaattggaactatgttaacatagttcctttttttctacctaatttttcatatataatggagaaagggaggaaatatcgtgaagctacgaaaactaattccatttttatttttaatatctctattagctataacattttccgcttgttcgacaaagggagaagagaatactgctaagcatagagttaatattgtaacttctactaatatttatgcagatattgctaaaaatatagttggtaaacatggtcatgtacaagctattataaaaaacggcgatacagatccacatgattttgagcctacgactggctctgccaaagaagtagctaatgctaatattgttattgccaacggtctaggatatgatgactggatgactaatttagccaatgctaatgatattcatgtggttaaagttggtaatcaattgatgggattaaaacagggggataatcctcatatttggtataacttaaacatgcctaaaaagtatgttgattatctagttaaaacagcaagtaaaattgatccaaaacatgcagcatattttaagtctaatgctgcaagctatttgcaaaagattgatagtataaagaaaattgctgctaaaattaatgggcgtgaagataaaccggtttatgttagtgagcccgtgtttgattatgcactagaacggtgtcattttaagattggcaatcaggcatttgaagaagctgtagaaaatgaaacggatccgagtgcgcaagttattcatgagatgcaagtcaaaattaaagctagaaaaattgctttctttgttaataatattcaagcatcaagtagtacagttagtggcatggttaaactagcagagcaacataatattccagttctcgatgtaagggaaacaatgcctaatggaattagttattattactggatgaaagcgaattatcaaaaattatttgaaattttttaaaaataactattgcataattagggactatcaggtaatataataaacgttgtgattgagagatcacggtggtaataactaataaaaataaataaaaaaagttcttgacttttaaaacatgattagttattataataaagtgctcttgattaagagatatgacccgttggtcaagtggttaagacacggccctttcacggccgtaacatgggttcaaatcccgtacgggtcactaatggaggattagctcagctgggagagcatctgccttacaagcaggaggtcacaggttcgagccctgtatcctccattgttcgggactaccgccgccgcggtagtctttttttatgcaaaaagaacgaacaagcaaaattattattttatcggttcaagtcctgagaggattcactatgattagtgaagatgccttgtaaccgaatagccaatgtctatatagggggactaatatggaaagacgtttgtttacttcagaatcagtttctgaaggacatccggataaagttgctgatcagatttctgatgcaattttagatacgatgttaaagaaggatcctaattcacacgtagcttgtgaaacgatcgtaactactgggatggtttttgtctttggtgaaatttctaccaacgcttatgttgatattcaagatgtagtgcggaagactattttgaagatcggctatgatcgtccagaattaggttttgatggcaataactgtgctgtgatggttgacatcgatgagcaatcacctgatattgctggtggggttgatcactcacttgaaactagagaaaacaagtctgataacgatgaattggatcaaattggtgctggtgaccaaggtttgatgtttggctttgcgattaaagagacacctgaactcatgccattaccaatttcgcttgctcatcgtttaatgagacgtgttgctgctttgagaaaagaccatactttagattggcttcgtccggatgctaaggctcaagtcactgttgaatatgatggaaacaataagccattaagagtggatactgttgttatctctactcaaactgatgcagaagtttctaatgaagaaatccatcgggcaatgattgatttagtcattaaggaagttattccggccaagtacctagatgaaaagactaagtttttgattaatccgtcagggcgttttgttattggaggtccaaagggcgattctggtttaactggtcgtaagattatcgttgatacctatggtggttacgctcgccacggcggtggtgcattttcaggtaaggatccaacaaaggttgaccgttcagctagttatgcagctcgttatgtcgctaaaaatattgtggctgccggccttgcttatcgctgtgaagttcaattggcttatgcaattggtgtagctcacccagtttcaattatgattgatactgcgggtactggtaaggttgacgatgatttgttaactgaagcagtacgcaatgtttttgatcttcgtccagccggtatcattaagatgcttgaccttcgtcgtccaatctatgaacaaacggccgcatacggtcactttggtagaacagacgttgatttgccatgggaaaagactgataaaacacaagatttgcttgattatattaaaaataagcaataaataaaaagagaaagtaaaaaagaatgaaaaaaacaaacgtgcctatagtcacgcttgcgatttttatgacaacttttatgactgccattgaagggacaattgtttctactgcaatgccaaccatagtttctgacctagatgggctcgagattatgaattgggttatatcaattttcttgctaatgacggccgtttcaactcctttatatggaaaactggcggatagcattgggcggaagccagtttttttgtttggaattgcgttgtttgtcataggctcatcgctgtgtggacttgcacaaaatatggtggagcttatcttattcagagtaattcagggattaggttctggcgcggttcagccagttgccatcaccattattgcggatttatatgctctgcaaaaaagagcgaaaatgttaggtcttaactctggtttttggggagtagcatcagttattgcaccgctattaggtggctttatagttcagcatctatcctggcactgggttttctacatcaatgtgccaattggaataattgcctttttgctcgtaattttttgtttgcaagagcctaaacatagctctaagtctaagttagatttgcagggaaccatttggttagtaattttattgctagctttgatgtttttcttacaagatttaggttcaaacactaatatcgccataatggccgctctagccgttttagtggtaattagtataattatgttctttagagcagaaaagcgcgcagttgatccaataatgccactcactatgttaaaagataaggagttccttgcaattaacctgattacgttattgatttctggcgtagtaatcggctttgaattttacattcctacctggatgcaaggtattaatggtactaatccatctctagccggttttgctgtaacgcctagttcattaatgtggattgtaggttcgttcttaattggcgggatgctaggccgctgggggattaaaaagacatatgattatatgttattggttttagttgtggccgatttggttttgattttagtgccgatttacacatcattctgggtcttctgtgttattgctgcctttaatgggaccgcctttggggcaattacgacagcttcacaggtgagatcgcaggttttggtacctaaggatgacataggcgttgccacttcgtttaatacgctgatgaagtatctgggacagacaatgatggtttctatctacgggattacttttaatacgatgttggcgcatgggttaagcaagagatcggggttgaatcaagaaatgatgaataaaattgtttctgcagaaaatgccaaaagtctggctgccaatgtagtgccacaattacggcaagttttgttaggcgggttaaaagctgtttacgttgtttctatgattgttattgtagtctcgattgtattgaatcaattgtatcgagatcgaaaattgaagaaaaattaagttgaaggagccacatgcaaagtagagcatgtggcttttttactggaaatttaatttcagtatttttattatatctacatatattgaaatattatttctatgaaagtaaaatagagttaaaagcaaggtgattaaatgaatgttagagatagaattttagagaattatacagagttaaaaaaatcatcacgtattattgctgatgcggtacttgaaaatccaaaaattttgttaaataaaaatgctaaagaaatagggaattatactaatacatctgcagcatcagtaattcgtttttgtaagcaattaaattataaagggttaaaggactttcaaatcgatttagctcaaagtactgtcaaacagtcacaacttaagccaatagatatgattgtaactaaagatgacaaagctgatgaagttatgactaaattaagggttagtttgagtcaaaactttgaagatttatctaagactattgatatcaaggatttacaaaaagctgtatccttaattaaaaaaagtcgagctgtgtatatagctggtattggggcttcaagcttttctgctaaggatcttttttataaactcattagaagtggaaaaacggttttttataatgatgatgtccacattgcattagagagaatatactattcaacgccaaaagatgtcatgatatgtttttcttatagcggattgactcaggaactattacttgcagttaaacaagctaaaaaaaataaaacaccaattgttgcagtgactagaaaatccgaatcccctttgagtaaattagcagatataaatttaaaattaccggatcatgaatcgctgatgagagttggtgctataaattcaacttttgctcaaatgtttatttcaaatgtgctttatttatgctcaatttcaagtgatttaggtgaggtaaaacaagaaatggaggctacaggaaagcttctcgaaaaattaaaagaaaggaatgattaatatgaatatcaaggatttaactacagagaaaagaaacagtgcaactatgcatatcgataatatgtcaactttagatatggttaaaactattaataaagaagatcagaaagttgctgaagcagtaggaactcaggaggagcaaattgctcaggcaattgacatggcttctaagaaataccatgatggtggacgattaatatatattggagctggcactagtggaagattaggtatattagatgcagtagagttagtaccaacgtatggaattagccctgatcgtgcaataggattaattgctggcggtaaaactgcaatgtatttagctgttgaaggtgcagaagattcagaatcacttgctgctgaagacttaggtaagctaaatttaactagtaaagatgtagttctaggattagctgctagtggtcgaactccatatgttattggaggattagactatgcacaaaaaatcggtgcagggacaatttcaattgcctgtgttaataatagtttaattggaaaacatgcagaaatagctattgaagctgtagtagggcctgaagtaattactggatcaactagaatgaaagcaggaactgcacaaaagatgatcttaaatacgatttcaacgggcgtaatgattaaacaaggaaaagtttatcaaaatgttatgattgatgtcttgcctactaataaaaagctagtaaatcgagcaattagaattattacgtcagttactaacgtatcaatagagcaggcgaaagatgtcttgcttaaagctgataaaaatgtaggattagcaattgttatggcaaaaacagggttaaatagtgatgatgcaagtaaactattagaaaaaaataataacaatgtcagccaagttttaaataattagctatactttgaaattaaatttcaaaaatcattgattatatgtcttaaaagtgatatttttatatttaagtaagcgcttactaataaagaataatgaaatattatttctatttgtacaaaaattgcatattagtgattgctttttcaaaagagttttgataatactactttgctaatgaatattagtaataagtaagggagggagaataatgaaacatcgcaattttttattagttgctctttcagttttacttttaggagcaggcttaactggatgcagtcagaaaaaagaggctacagctactccggctgttacacctcataagagtcaagttgttacaacaactatgtattcgaaaaaattacatatggattggaattatgatgtatatttaccagcaggttacaatccaaaaagcagtaaaagatatcctgttttatatatgttgcatggaatctatggtaatcatagaaacttgctagaaagatttaattctcaacaaattcttgatggagaaattcatcgctgtaataaaaagatgatcgtagtttttgttgatggctttaatagcttttatattaatcaaaagcaaggtgggatgcagatggaaagtgccatcgttgatgacatggtccctactattaataaattgtataagacagaaaccaatcctaaacatgtaggtattggtggtatctcaatgggtggatatggtgctgccagattggctttgaaatatccagatatttttggaaatggtgttctaatttctcctgcagtttggtaccgcttgccgaataacaacccaattaaaacttcacagtatgcttttcaagatggaaaaagtaactgggattggaaattttatgatagtgtatttccaactaggtacattaatagtaaatcagagaaagataagttctttgtagagactacttcaagtgatactaccgttccagtaaaaaatgtcgatcgctttgtgaaaactcttaaaaaccatgacattagtgttaagtttgtaagagacaacggtggcaaccataattgggcttattggacttcagcagctccacaagcttatcaatgggcattagataatttaaattaggaggtgtaaaaaatgagcaaagatagtgaattagccagtagcattttgaatgatattggtggtaaagacaacgtttccgcagttatttcatgtatgactcgtctacggattagtgttaaagatgattcaaaaattaatttagatcagttaaagcggcttaatggagttttaggagtagttcagtctgaaactttacaagttgtactgggaccgggaaaggttactaaagttggaactgaatttagtaaattagccggtgtgccacttggagaagaaggcggcgatgattccaatgaaacattagatgaagttaaagctagagctcaaaaaaataaagcggcacaaaaagctaaacatgataagcctttacaacgtggattgcatcatattgctaatgtttttattcctttacttccaggaattattgctgcaggtttagtcaatggtatctgcaatgttattgattatcaatctggtagtgcttttgccaatgattggtggtatttaactattaaaacaataggatggggactatttgcattcttaccaatctttgtagggatgaatgcagctaaagaatttaaaggtagtgcaattctaggtggaattggtggtgtattctgtttaaatttaacaggttttgctgcgtaccctttaaattcactggcagtatcaatgccattcactaataagccatatgttgctggtgttggtggtttgcttaccgcactgtttatggggatctttatcgcatggacagaaagacagattagaaagtttatgcctaatgctttagatacattcttaacacctctttgcaccctgatcttttgtggtttaatttcagtggttttcttacaaccagttggtggttggctaaccaatattatttacgtggctatggacttcttatatgataagttaagctggttcggcggttatattttatcgtcaactttcttagcattagtatctgttggtttgcatcaagctttaacgccaattcatgttatgctgaatgaccctactggtccaactcatggaattaactatttacttcctattttaatgatggccggaggtggtcaagttggtgctggttttgctctttggcttaagagcaaaaataagcgttttaaaaatatggttatgagttcaattcctgtagctattttaggagttggtgaaccattaatgtatgctgtgaccttaccattaggacgtccatttattacggcttgtcttggtgctggtttcggtggtgttgcagcatcattattccatttaggtactgtctcacagggggtatctggattatttggactgttaattatgcagccaggtcaacaggttgaattcttgattgctttgttaatttcttatgtaggtggctttgttttaacatggttctttggaatagatgaagcaagaattaatgaagtctttcctgaatgataaaattaaagaagtaattgaaatcattgtaactattacaatgatttttatttttaacggagaagaaaaaatgctaggaatatctgtatatttccaagattatgatgaaaactatttgaaaaaagcagctcaagctggtgcaaaatacgtttttacgtcacttcagattccagaagaagattattcagatctggatcaaaaattaccgagattttttgaattgtgcgatgaattgggacttgaagtaattcctgatgtttctccggctacattggaaaagctaggaattaaaggaggcgattttgaagccttaaaagataagggattcaaggccttaagattagattatggttttgatgactttgatttaatcaaaaagctacaaagaaatttctttattttattaaatgcaagtgttgtgtcactggactatttagatcgtgccagaaatgcaggggttgattttggtaaattagctttaacatataatttttatccgcatacagatacaggtatgggatggacagattttaaacgtaagaattggatgttaaaggactatggcttaagaactcaagcttttgttcctggggatgcacttaaacgtttcccactatatgaaggcttgccaactgtagaaaagcatcgtggagtttcgccttacgttgcagctgttgaattaattcatgaagcaaatgtggatgatgtgtttattggcgatagcaaggcatcaatcaaaaatcttcggtatattgtagattatcaaaaagataatattttaaacatagaatgttcgctattgccacaatatcaacagctgtatgatcaagtgattgaagtaagaaaggacatgccagaaaagctgattcgcttaagtttgcctagaaaacctgatattccaatttgtaatactttaaataggcgtaaaggcactattacaatgcaaaacaaattagctcaaagatatagtggtgaagttagtctgattaagtcaaatttaccttttgaagcacgtagtaatgtgattggttttatttcacctgagtatgtgaagttgcttgattttattgattcgagtacgaaaatcatttttagaaggctgacatagaagaaaggtgatattatgcttaatttggcaaataagatttcagatgtatatcctaatttgaataaaacttctaagttgattgctgatgtttattttaaagattcaactcttttcctaagtaaaaacttgcaggaattaggtgctattactaaaacaagtggcgcatcagtgattcgattttgtagaaaattgggtttcaaaggctttaaagattttcaaatagcttgtgcacaagaaatacctggcaagcaagataatacggtggatacaattattaatgaaaatgatgagccgaccagtgtgctttacaaattacagattagtttagaaaaaaatattgcagacattggcaaaacaattgatcatcaatctctagcttcagcggtacaattaatgcgagccgcacagaagatttatgtagcaggagagggtgcatctggcttagccgcacaggatttattttacaaattaattcgtagcggaaaagatgctgctttcgtccaaagttcgcacattgctttagagcaagtagctaatattaagacagaagatattttaattaccttttcttatagtggattaactcaagaaccactgctaatggcaaaacaggcgaaagaaaatcaagctaaaataattgcagtaactcgtgcccagaattcgcccttaaaggatattgctgatactataattgcgttaccatcaaatgaaaaattgttgcgttacggcgctgttaattcactatttgcagaaatctttgcttctagcttgctatatttgagtcttatttcgccaaatttaaaagaactaaatatgaaaatgaaaactacgcaaaatttgactaatcaattaaaagtgtagaatctataaaataacaactaaataaattttaaaaaatcaaaaatattttcatgatgaaaataataaaaataaagaaaaaaaggaccagtttggtccttttttagtactttttttgcggttggaataaatctatatttgacaatgctataattataaatggaaagtggcctaaaaataagataacactattgaaagcgcattatttgcctccttgaaagtaaatctaagtagctgtacacttaaattgagctgaataacgaacgttattttttggcagagacttgtaatgcgagtaggaattatgggggcgtaaaaatggatattactagtttagcaagattccaatttgctatgacgacgatctttcactttttcttcgtgccattttcaattggtacgatattcgttgtcgcaattatggaatcaatgtatgttcatacaggcaagcctgaatataaaaagatgaccaagttttgggcaatgtcattaagttaagctattgacattggagaaaaaaacaattaaagcatcatttggctttagatagccaatttgatgcttttttgcgtatgctaaataagcgtagtttgtatttcttttttaattaggccacgcgatacatgtaatatactgcagacttggcttttaaatttcgtttgtcttttcgcctttatttttgcaaaaaaaagaatcgaatccaaatgattcgattcctaaaaagatcagttttcaaaagtcaatagcttaacttaatgacattgaagttttgggctaatatctttttattgagttttgccgtcggtgttgtaaccggtatcattcaagaattccaatttggtatgaattggtccgattattctagattcatgggggacatctttggtgctccacttgcttttgaagcattgttgtcattctttattgaatctacctttattggtttgtggatgtttacttgggataaagtggggaagaaattacacttattctttggatggatgatcgtctttgggacaatgacttctgcattatggattttaacagcaaactccttcatgcagcatcccgtcggctttgctttacgcaacggtcgtgccgaaatggctgactttggagcacttcttaagaatccacaattaatgtatgaatatggtcacgtaattgttggtgcacttttaactggtactacaattttgactgggttagctgctttccaactattgaagaaacgtaacctttcagacattaacaagaagatctatcgtaagacaatgcgtttaggcttaatcttaatgttaattttctcagctggtgaaattgctgtgggtgatatgcaaatgcaatatactttgcatgatcaaccaatgaagttcgccgcaactgaagctgtttataagacaactggagaaaaggctccatggacggtagttgcaattgctaatccaaagacccatgaagttaagggaattgatattccagacatgttaagtattctttcttaccacaagactactggttctgtaaaaggtatggaagaaattaacaaagaacttgaaaagaagtatggtacacatattgatggtcgcaagatggactactatgtaccagttaatactttattctggtccttcagagtaatgtgtggttttgctgcattattattcttgatggcaattgttggtttaatcatgactcgtaagaataaagaaaccctttataaccatcgttggctattatggatcttcgcacttcttacattctcaccattcttggctaacactgccggttggttaattaccgaacttggccgtgctccatggacagtttatggattatttactattgatcaaagtgtttcaccgaatgtttcagtggcttcacttttaacatcaaatattgtttacttctgcttatttactattttagcaattatcatgattgcattggttgttcgcttcatgcacaacgatccagatgaatatgataaggctcaagaggcaagcaaagtagttgatccgttctcaaagggggccatttaaaatgtcatttttacaaatactttggtttatcttaattggagtattgttctcaggcttcttcttccttgatggttttgactttggggtaggaatggccgtgaagactttagctcataatgaacctgaaagagatcaagttgttaggacaatcggaccagtttgggatggtaatgaagtttggttgattactgctggtggtgcaatgtttgcatcattcccatactggtatgcaaccttattctcaggttactatttaattttattattgatcttagttggcttaattattcgtggtgtgtcatttgaatttagagcaaaatgtgctccatatcaaaagcatatttgggataatgcaatggcgatcggtagcgtaatggccacctttctctttggggtaatgtttatctcaatgattaaagggatgccaatcgatgctaaaggcaatatttcagctagcttctttgactactttaactggttctcaatcgttggtggtattgctttaacacttctttgctatttgcacggcttaaactatattactattaaaactaagggcgttatttcagatagagcacaaaactatgcacaagctttatactgggtactctacgtcggtgaagttgtctttgctttattattgattttccaaaccgacttcatgagagtacatccaattgcaactttagtatgcttagcattaattgttggtttctctgtagcagcacatgtagctactttcactaacaagcaaggaatggctttaacttgcagtggattaacgttgatctcattggtcgccttaatcttctgtggtttattcccaagagtaatgatttcatcaatcagcagtaaatatgatttgttgattcatagtgcatcatcatctaactacactttgattgttatgactgttgctacttgcatcttggtaccatgtgtcttggcttacaccatctgggcatattggatttttcgcaagcggatttcaatgccaagaatcggagaggttaaataatgattgataaacagctatttaaaattgatggcgctggttcaatcttaaaaaaacttgcagggcttgagattctgcaagctttttttatagtaggacaagccttggcactagcgtcagtcttaagcaaattgtgggcaggtcaacctctcgattggctactactaattacttttgcagcttgctttatcgccagacaattgatcagcacactgagagattcaatgttagaaaaatattccggtcgggttgcagaagaattaagacagcagcttttaaataaagtctttcgtgatggacaggctttagtacaaaaacaaggaaccggtagtttgattactatgtccctagatggtgttgatgaggtcaggcaatacattaagttaatctacagcaaagttttaacaatgatgattgtgccagttttaatctttgtcggcatgctgtttttaagctggacatcagctgtgattctgctagtcatgtatcctttaattgtcttattcatgattatcctaggtcatgctgcacaggatcgagcaattaaacaatttggtaactttcaggttttatctaataactttattgattctttaaggggaattgatacgctgaagtatttaggcctgagtaaaagatattccaagtcaatttttaacttgagtgagggttttagaaaaaagacgatggcggtgctaaaagtagcaatgctttcaacttttgccttagactttttcactaccttgtctattgcaatcattgctgtttttcttggttttgacttgatgaatggtaaaattgcactttttcctgctttaggaattctgattctggcgccagattattttttgccaattcgagattttgcgggggatttccatgcaaccttgaatggtaaaaatgcctttaagcggatcaacgaattgattaatctgccagaggaaaaaactaatgatttacctttaaaaacttggtcagctcaagatcaattgaagatcaagaacttgaagtttacttatcaaaagggaaccgaaattggaccggtttcattacaagtccaaggattcaagaaaattggcattatcggaatgagcggatctggtaaaactagtttaattaacctgctcagcggctttttgactccggatcaagtgcaaattgaactacaagggcagaaaactacgaccatgaatattcctgcttggcagcgtcaaatgacctatattccgcaggagccatacgtttttactaagagcttgcgtgaaaatattgctttttataatccgcaggcaagtgatgatgaaattaagcaggcgattcatatcatgggtctggatgccttgttaaatgatttgcctaacggacttgatacggtgattggccgcggtaagcgtgtcttgtctggaggtcagtcacaaagaattgccttagcgagagcatttttggatcctaagcgaaaaattatgatcttcgatgagccgactgctcacttagatatcgaaacagaaattgacttaaagaagcggatgatgccattaatgcaaaataaactggtcttctttgcgactcacagactgcattggttaaaagaaatggactatattctagtgatggatcacggtcaattggttgagcaaggaagttatgagcaattgcagcaaaatcaaggctacttctgcaagttaatggcaggaatgagaggtgaaaacaatgatcaataagattccggttttaagagcattaaaaaatgatcgttgggttcgcccatatttggaaaaatatcgtaaaacgttgattttggcgattgcactgggcattttaactttcgtctgtggcgggggcttgatgttctgtgctggctatttaatcagccgttcagcagctaaacctgaaaatattttgttaatctatgtgccaattgtcttaactagagcatttgggattacgcggccagctgtccgttattttgagcggctggttagtcacaattgggtgctcaaaatgacctccaaatttagacaacagctttatgactcattggagcgcgatgcgactatttttaatagtaagtatcagctaggaaatattctgggacttttgtctgatgatgtcagccatattcaaaacttttacctaagaacgatctttccaatgtttgtagcttggggcttgtatgcaattatcgtaattggcttaggcatcatttccccactgatgggcatttggatgttgatcctgtttttcttgattatttttgctattcctatttggtcagtcttaatcaatggtgcgcggcaaagctatgaaaaaacggttcaagacaagctctacgttgatttgactgataatgtgatgggagtagatgactggattttgtctggccgcagcaaagaatacttggccttgcatgtcaatgatcaagataaatttttgcaaatcaacgcgaagatgaaaaaatttgatcgctggcgcgactttgttttacaaatcttctgggtgttggtaattgtgagcctagtaatttggggtgctgccagatttggcgggcgttcaacttattatactaattggattgcggcatttgctttggcattattcccgactgttgaggcttttgccagtttgccgactgctgctcaagagacgaatatctacaaagattcgcttaagcgtttgaataatttgccagctcctgatcggactaagcataaaccaatcaaattaaccgcaccgtttaatttagtattaactgatgtgcattatgcctaccctcaaactaataaagaggttttgcatgggatcaacttaaatatccatgatggtgaaaagattgctattttgggtcgtagtggtgcgggtaaaagtactttagctgccttgctcagaggtgatcgggtaccagctaaaggacacgtaactttaaatggaattgataccagcaagtttggcgatcaaatgtccaattactttagcatcatcaatcaaacgccatatttgttcaataccacgattgccaataatttgcggctaggtaatgaagatgccacagatgagcagctatgggacgttttgcaccgagtaggtttggccgagatggtgcaaaaattaacggatggccttgatactaaggtggatgaggcaggattacgcttttcaggtggtgaacgccatcgtttagccttagcgcgaatcttactgaagaatacgccaattgtcttacttgatgagccaacagttggcttggatccaattacggagcaagctgtaattaatatgtttattaaggaattatccggtaaaactttaatttggattacacaccacttgcaaggaattgatcagatggatcaagtaatttttattgaagatggacaaattaatatgcagggtacaccggaaaaattatggcagacagagccgcgttatcgtgaattgaaaaaggctgatttaggattatagaggttcattatgctaacgaataaagtgccagaacaagatgtgcatgacctatttactagggtcgcacctaagtatgatttgatgaataatattgttagtttagggattcaaaagagttggcgtaagaaatttttacggcagttagatttaaataaaaattctatttgcttagatttgtgttgtggtagcgctgattcaactattgatttgactaaaaaagctaaattagtgactggtctagattttaaccaggagatgctgaagattgcccaaaaaaagattcgtcaaaagcagctgcagtccaagataaagttgattgcaggggatgcaatgaatttaccttttgcggccaatagctttgattgtgtaactatttgttttggcctgcgtaatgtccctgacgctgttaagacgattcaggaaagctaccgcgtacttaagccgggcggacaatttgctgttttagaaatgtctcagcccactaatgcattagttaaattgggctggcaagcttattttaaaatttttccgtattttgctaagttgacacacggtaatatcaaggactaccagtatttgtcaaaaacaagtaaagaatttctctcggctgagcaattaaaaaagctacttgagcaaaatggttttactcgagtagcggttactaagttaacttacggtgcaggtgcgattcatttgggacgcaaagactaaagcgttcgattgactaatttacgcgtcatctttttgagcaagacggtcgcattagtttgcggcagttgggctaagttagctaatgcccgattagtgtattgttcagctaaggcatgagtttcttcaatgactgagctgtttagcaaaatcttttggatttgttcgatatcgtttttgctcatttgtcgctttttttcaagtagcggtactaattgctctcgtaattcctttttgctaagagctagcagaataggtagagagtagacgccggtagtcaaatcttctagcgttggcttgttcaggtgcttaccgccagtgtaatcaagaatgtcgtcaacaatttgaaaagcaatgcctaaattttcaccaaaggaggctaaagcttgagtagtttgctcatctccattgccaaaatggcttccttcttcggcagctaaacgaaaaagtgcagctgtctttcctttaacattagttaagtagtcgttgaaatcttggcttaggttaaaacgttcagccatttggcctaattcaccagcaagtaaatggtgcattgtgtgagcatttttgatcatgtaatcttgttcggaaatggcgttcaaaattaggtcaaaaaagtgcgtaaaaagcaagtcgccagcgtaaactgcggtgtctttgccaaaacgggcttggatgctaattttaccgcggcgctcgtcagaatcgtcaatgatatcatcatgaattaatgaggccatatgcaaaatttcgattgatgaggcaagttgaataatttgttttgatacagtttcttttttgctagcaatttgagctgacaaaattagtaaactaggccgtaaatatttaccaccgttactagccatttcaaggagtgcatcttgcaagtctgaatatggagtgcggatggttgcctgaattaattgattaacttcttcaagcggtttacgaataagtggatatttttgccaaggttgagagttattcatgatagatttccttataatagagttaacagaatagtgatcctttgaaaggatgtggatcgatgtcattaagtgtatttttagaattaattgagattaaagcaaaaaccgctagtgtcattccctttttcttagggatgtgctacagcgtgtattattatcaccaagttaactggggatttgccctagtcttcttcattgcaatgctactatttaacatggtagtagatatgtttgataactactgtgattattatcacgcagatagcaagaattaccaagagaagactaacattatcgggcgagaaaatatttcacctaatttagttctgggattaattatttcctttagtcttattgcaattttattaggtttgtatctagtcgctaaagtaggcttgcctgtattgtggatgggcttgttctgttttatggttggttatttatattcatttggtccgcatcctatttccagcttgccactaggtgaattgttctctggtttcacaatgggcttcatgattgtactgctcagtgtttatatcaatagttttcaagcttttgattggaactggatcacaatcggtcgtatcttcttattagctttagctgataaattatggatttctaatttaatgctagctaataacttatgcgatgcccaagaggacgaggataatcaccgcaccacaattattcactttattggtaaaaaaggtggcttgattgcttttagtatcaaaaatgttttagcatttttagtaatcttcctcctaccgtttttgggaattgctcctaagacggtttggttaacagtaataattgtaccgttcgtttataagcagaacaagatcttaattggtaaacaagttaagacagagacatttatcacaggagtaaaaacgttgctagttggttcactgacttacttaataacttactttttaggaattctattttagagaggttgaaaattatgaaaacagttgtagttttaggtgctggttttgccggcttgaaaacagttgtcgctttgcaaaagaagttgcgtgaacaagttaagattatcttagttgaccgtaatccataccactacgaaacaattcgcttatatgaagtggctactggtgaaattccctacactgggatgtcatatgaaattaatgatgtaattaatccgaagatgactactgtgattacggatgaagttgaaaaagttaatattgctgataaaacagttgagttaaaggatcatgctccacttaaatatgactattgtgttgttggcttaggctttaccttgagcaatatgggcattaaaggtgtaaccgaaaatgctttgccaatgagcaatgtaaaacaagctgaagctattcgcgaccacctttatgtcgaaatgaaagcttatcgccaagaccatgattctaaacacctgtcagtagtaatttgtggggcaggttttcaagcaattgaattaggaaatgccattgcaaaggttcgcccagaactagctcaaatggctggcgcccaaccagatgaaattaccatcagaatgattgatggttcgccacgtcttttgccaatgttccaaggtaaattgcttgattacgctttaaacacaattaagaaaaataaagtcgaaattattaagccagcttatgttaatgaagtaacctctacctcggttttgtataaaatggctaatgaaaaagacaatgctgagctgcaagaaattaaggcaggtactagaatctggatgatgggctttagtggcagtccagtaattgaggcatctggatttaagaaccgtcgtggtcgggtcatggttggtgatcatttaaccgcgccagaaagtgatgatatctacgtcttaggcgatgtttcaagcgtcatggttcctggtaagaaatggccatatcctaacactggtcaattggctctttcaatggctaactacgctgcaaaagatattaagagcagaattatgggtcaaactagaccggataaatatgcttaccatgacttaggtgtagtagttaacttgggtaattcagaagccgcaggattggcaatggggcatgcttttaaaggatactttgcagcaactcttaagaagattaccattgataagtcggttcttgaaactggtggtattaaagaaacaatggcgattggtcaatttgacttctatcactaaaattgaaaataaaagagaataaaaaatcacttcagtttgatttgatatgaaccccaaatttgggacatattattgaactgctttatttaaaaccatatttcgatattctatcggagtatggttttttagtactgttttaattctttcatgattgtagtaatgaatgtattaggactaaagtgtgaagttgcgccattttatgtcacaccaagaagacctgctattcaccacactatgggtggcttagtaatcgacactaaggctcatgttttaaataaggacggtcaaatcatcgctggtctttattcagcgggtgaaaatgctggtggtatccatgccggtaaccgtttaggaggaaattctttagcagatatctttacctttggtagaattgctgccaatactgcttatgaggataagcatgttaccgatgttattactggcgcttcgcagaaataaagatagagtataaaaaaatacagatatatcaatttaaatattggtatgtctgtatttctatttggagtcattttttccttaccttcgaataaaaacccatgatttctaattcttactaacaaaaataatagtaacttttctaacttcccaaaaaattttgcgacttttttgcgtaataaataatagaggataaatatcctcaaattatttaaggaggactttgcatgagcaaagagaaagaactaaatgtgtctgaagcattaggttttacggatgatttgatgtttcagaatgttatgagagatccagagatctatcgtatgtccttgaatgaggttctaccacatttggacattcaagatatcactgtatgcacgcaagaaaggattgcttttaaccaagaagagaaagtttcgattcttgatgtcctgattacggatagcagaggcaggcgttacaatgtggaaatgcaggtcgcgcataaagcagacatggataaacgagccaggcaatacctgttcaagatgatggaagatggctttttacgacgaaaacaagaatatggcgagctgcacgctgcatatgtaatttttattctgccgtttgatcccaaaggaaaaggcttgaagcgatatacttttgtttatactgctaaggaagacccatcagttgaattaaatgacgattctgcgataatatatttaaacacaaagggaacaaaaggcaagatcagacctgagcttgatgacctttatcgcatgattgaaggcaagccaacttcaaatggaaaactcgtcagtcgaattaaaaagtcgatgaacaattatcgtagaaccgaagaatggaggcaacacgtcatgaacacagaagaagtagcagaagcagcaaagcagcttggcatggaagaaggcatacatgaggcaactgttgcagcaatccataaaacgattaacatgcttagaaggatgaagcgcagtcccaagcaaatcttgcaagaattagaacaagattatggcaatgaattttctgaagaagaactagcagactttgtgaaaaacgcctagtcgataagatataatgatagctgtgaagctatcattttttagataacgggggcttgatcatgaataatcctgaagaattacaacattttttagatgttctgctaaaagagagtaactttaccagagcagctaaagaattatatatttcccagccttatttaacgcagctaattggacgaattgagaaaaaattaggcactaagatcatcaaccgagatgagagaccctatacgttaactcctgcaggtctaatttactatcaatatttggagaatgtttcatataataagcagcaattagggcgcaagctggaggcatatactcatcctgaccaacagataattaaaatcggcattttggagagcttaggtacatatttattgccagaaattttgccgcaatttttgcaagaaaaccccaacgtcaagattcagctatttgaaaatttccccagagaaaatgaaagaagactgcttaatggcgagctggattgttatattggtcagacgccagaagcacttgactcgagtttagatgtggttgcgggtggcgaggaacgctattacgtagtgatttcgccagcctcaccatattaccaagcaggaaagtttatcttaaattcggatgaacttgatctaaaagaggtactgcaggagcctttagtgttgagttcacctggttcagctatccggcatcaagttaatggcttatttcagagattaagactcgaaaaaaatattgtgatggagtctaatagtattattactgcaactaacttggcaattcacggcgtgggtattaccatttcttcggcaagtattatcagaagaatggaacaaacgccaattaacttgttgccactagatcgaaagttaatggatgttgtctttttcattactagcaaaagcggggaaaagtcgccagcgttagaaaacctaatttcaatttttcaaaagacgcatttacaagcaaaaataggataaagaaaaaggcatcatgcgatgccttttaaattgctttgatttctattgttttcgtttcatgtcgatcatcttcggctcaatgtagaagtgatagaggaaggaataaccaagcagtacaaaggtaattccttcaatccaaccgccgaatacatcagatggatagtgcacgtggacgaaaattctggtgtaaccaatcatcagtgggaataaagcccaaataataatcaataaagtcttccagaatttgcttctcactaaaagaatggttaggataatcaaaacaccaaatagcgccgcgctaccaactgagtgccccgatggaaaactataaccatccgcataaactaagtgcttgaccgttggacgctgccgcattgctgcgtgtttgataatccaattatagccattagcacagatcatgacaccagcggtaaaccaagcgtatgcatattgcttaaagaccagtaaaactatgaaaacaatgattgtttcaattgtgatcacgcttgtattgccgagattagtaaaatctttagcaaaagcgacattagctggattattgttgcaaacaatgttgaccacagcattatcaaaattgtgaataaattgtgagccggatgaaaccagtgcggcccagacagcataaataaccacgaagcagataccaggtattaaggtgtccttaggtggtcgtttcgtattaatcaaaaaagtactcccctcttgaaatttatagcatttgtggtaaattataatcattatctataagaaaataaaggtcgagaagtagtaacaaggatatttttttcagagagagactggttggtgcgaagtcttagaataaaattgtgaactcgtctcttaataaaacctagcgttgccatccgcgttaaggagcaattaagtgtcacaattttgtgaaacttaggtggtaccgcgatgattcgtcctatgattttttcatagggcgttttttgatagtaaaggagagtttatcttgtataaccacaaagtagttgaaaagaaatggcaagattattggtcaaagcatgatacctttaagacaggtactgaccctgataagaagaattattatgcattggacatgttcccattcccatctggtaagggacttcacgtaggtcacccagagggctataccgcaactgatattgttgcaagaatgaagcgtgcacaaggctataatgtgcttcacccaatgggctgggatgcatttggtttaccaactgaacaatatgcattgaagactggtgaagatccagaagttgttactaagaacaacattgctaactttaagcgtcaattgaacaagttgggcttctcatatgattgggaccgtgaagtaaccacttcagatccaaattactacaagtggacgcaatgggtttttgaacaaatgtataaaaagggcttggcatatgaagctgaagttcctgttaactggtcaccagacttaggtactgttgtggctaatgaagaagttatcgatggtaaaactgaacgtggtggctacccagtatatcgtaagaatatgcgtcaatggatgcttaagatgactgcatatgccgatcgcttattagaagaccttgatgatttggattggccagaacccgttaaggaaatgcagcgtaactggattggtcgttctgaaggtgcgcaagttactttcaaggtaaaagacagcgacaagacttttgatgtctttactactcgtcctgatactttatttggtgttagctatacagttcttgcaccagaaagcaagcttgttcaagaaattaccacacctgaacaaaaagaagcagttgatgcttacattaagaaaattgaatctaagtctgatcttgaaagaactgatttgaacaaagataaaactggtgtcttcactggtgcctatgcaattaacccagttaatggcaaggaagtgccagtttggatttctgactacgttttagctagctacggcactggtgcagttatggctgttccagctcatgatgatcgtgactatgcttttgctactaagtttggtttgccagttaacccagttattgaaggtggcgatattgaaaaggaagccttcacaggtaatggcaagcacttcaattctgagttcttagacggcttggataatgaagaagctaaaaagcgcatgattgaatggcttgaagaccataactgtggtaagaagaaggttaactacaagttgcgtgactgggacttcagccgtcaacgttactggggtgaaccaattccagttattcactgggaagatggaaccacttcattagttccggaagatcaattaccacttcgcttgccacatgcaactgacattaagccatctggtaccccggaaagtccacttgctgacttgactgactgggtaaatgttgttgacgaaaacggtagaaaaggtaagcgtgaaaccaacacgatgcctaactgggctggttctagctggtactacttgcgttacgttgatccacataatgataaggaattagctgactacgatttgcttaaaaagtggcttccagttgatctttacatcggtggtgcggaacacgctgtgcgtcaccttctttatgcaagattctggcacaaggttctttacgatttgggtgttgtgccaactaaggaaccattccagaagctttacaaccaaggcttaatcttgaagaatcacgaaaagatgtctaagtctaagggtaatgtagttaaccctgatgaggtgatcgatgaatatggtgcagattcacttagaatgtacgaaatgttcatgggtccacttgatgcatcaattgactgggatgacaatggtcctgcttcaactaagaagttcttggaccgtgtgtggcgcctctttgtaaacgatcttgatttgaaggccattccacaagaaagaatcgttgataagaatgatggtgaacttgacaaggtttatgcagaaacagtcaagaaggtaactgaagactttgaatcattacactttaacactgcaattagtcaaatgatggtcttcatgaatgctgctcaaaaggctaagaccattccacgggaatacgcagaaggctttgttaagcttttagctccagtggctccacatatgatggaagaaatttggcaagtctttggtcatgatgaatcaattacttacgctaagtggccaacttatgatccagctaagttagttgagtcaactgtagaaattatggttcaagttaacggtaagcttcgtggtaagttccaagctcctaaagacgctgcaaaagatgacttgcaaaagcaagcaatggaaattgaacacgtaaagaagttcttggaaggcaaggacgttaagaaagttatcgttgtgccaaacaagattgtcaatattgttgctaaataagttagattttcctaaaaaataataagaatacttattatttagatttattgaattgattagttgagacttttattgggaaaattttaatggaagaaaataacttaaatagcaaagatacacaaaatacttttctaaaaggttccgcatggatgacctttggctcaattgcctcgagaattttgggtgctttgtatattattccgtggtatgcctggatgggctcctacggcaatattgccaatgctttgactgcgcgtagttataacatttatacaatttttatcttaatctcgacagccggaattccaggagcaattgctaagcaggtagctaagtataatgcactaaacgaatatgggattggccgcaaattatttcgcaaaggcttaattttaatgaccgttttgggtattgtctcagctgcgatcatgtattttgcttcgccgcttttagcttcaaatgggagtcaaagtgatccaagacaggttgcagttatgcgtagcttgtcttatgcgattttaattattccaattttgagtatcatgcgaggctatttccaaggttatgccgatatgatgccaagtgcgatgtcacagtttgttgaacagtttgcccgggtagtctggatgttgctaacggcgtttgtaattatgaaactgcaacatggttcatatgttcatgcagttattcagtcaaacttagcggctgcagttggtgctttatttggaattggcttattaatttggtttttgttttctagaagaaaacaactagattatttggttgcccattctaataatcgcttgcgggtctcaacgactgaattatttggtgaaattattgcacaagcaattcctttcattattattgattcaggaattaccttattttcattggttgaccaatataccttccacccgatgattgccagtctagttcatgctagttcagatacaattgaggactggtatgccttgtttggtttgaatgctaataagttaatcatgattattgtttcgctggccagtgcaatggcggtaaccgcgattccacttttatcagcggcgcatactaggggagactataagagcatttcaaagcagattgctaatacgatggacctatttttatttgtaatgattccagctgcttttgggatggcagccatcagtaggccaatttatacagttttctatggtccagatctattggggagcaacgtactatatctgtcgtcatttaccgcgattagtttaggattatttacggtgctgatggcgattttgcaaggtctttcgggaaatggactggctatcaagtacctggttttaggattgattttaaaagggatcctgcaatatccaatgattttcctatttaaggtatacggtccgctggttgctactaatttaggtttattaattattgtggcactttctttaaaacatttggaagtgcagtatgattttaatttgaatcgaactagtagaaggctggctggagttacagcattttcagttggcatgttccttgtggttaaattatgtgaaatgggactaggcaagtttctcaatcctgatcatagatttaatgcattggtgctagtgattgtagctgtaggtgctggggttgtcttttatggcttggtgacattgaagacagggttagtccaaagcgtcttaggtagtaaggtagaaagtattttagttagactacatatggataaataaaagaaaatcaaactgttgtgatggcagtttgatttttttgttataaaaaattgcggctctttgtcaaatcttactgataaggtgtcaagtctaatttttcctggtagttgagtaaatttttggccgggggatggcttacttgagtaagtttttgtgcaatttctaagtgaatcaaccctaattgtcaaaaaactgccactccctcttgcaaagacgataattagtgttattatataatgcataagaaacgcaagaaatgtgtataaaaacaattatttttagcaaaggaggcaaaaagcatgattaatctgactgttaatacaatcaggcttagcggtgtcgctgcaagagcaaaccgcgtcatgttttaactgtcctttagacaaagtgaatcaaagataatttaacagcacagtattaagtacacccggtttatcggcgtcatcgttaactgaagattttttgttatgcgtgttagctaatgaggtattaagatgaacaagggtaagactttaatgactggtgctgttatttttatgtgcgggagcatgctggcggcctgcggcaagagccaaggagcatctgtcaagcagaatttaaactggatgaccagtgcgaaaatcatcaccatggacccatccaaagccaccgacaccacgtccttccagcagattgaaaatacgactgaagggctctaccagctgggcaaagacagcaagccggttaaggtactggtcaagaagacgactgtcagcaaagacggtctgacctggacttttgaccttaagaaggggactaaatggtctaatggcgaaaccgtaactgccaaggactttgtctattcctggaagcggacggtgaaccccaagacagctagccaatacagctacattttctctgggattaaaaatgccgaccagatcgttgctggtaaaaagaaggccgatacgctgggcgtgaaagccgctggcaaatacaagctgcaggttagtctggaacataagattccatacttcaagcttttgatggccttctcagtctttttcccagaaaaccagaccgcagttgaaaagtatggctcaaagtacggtacgtcatcaaaaacgaccgtttataacgggccattcttgcaaaagggctggacgggctccaacttgtcctggaccatgttcaagaacaagaactactggaacgccaaagccgttaagctgcaaagcatccactttgccgtggaaaaatctccgtcaacggcctactacctctaccaagatggcaagctggacacggcaagcctgagctcacaagcctccaagaacctgcaaaagtcaccagactatgttgtaagaaagaccaacgggacgacttacttccaatttaacctgaaaatgaagaagttccagagcaccaagatgcgtcaagccatctccatggccctagacagaaacgccttagccaagaccttgggcggcggctacacgggctctaagaactttacggcagctggcatgaccaaggtgggtgacaaggattttaccgacctctctcaaaccaaggaaagcttgctagtaacgggccaccacaagcagctggcccaaagctactttaaggaaaggttgaaggaacttggcttaaagaagctgtcctttacggtgattacggcacacgtccaagtccatcggcgaatacttccagagtgctcttgaatcaacttttggcaagcaaatcgacgtcaaggtgcaaagcctgccaaccaagtcccaatttgccaagatggactctggtaactttgaagccacgatcagcggctggaatgcggactttgccgaccaaatttccttcctggactgcatgacctctactaatggctacaactcaggcaagtggatgaagctgctggcaaaggctgaaaacaccttgctggttgatcagcggctcttactacttcgaacacgtctacattgccaagtaagccagtaaaaaatgtattatcatgctaggtattatgtagtagaaagtgaagaataaagcgtaaattgctataattaagatagaaataagggaaaatcttaattagtgaaggagcgaaagataatgaaagactcaaattcaccaatttacaacatttggatggtggttctgctggttgccgcatatgtctggccaatctttggcttagcaccagccatctacctctttatcaagcgcaaggatgagaatctggtccctttgaagaattggattactctagccttgatctggcagattgttttgtggctgctcttgattttggttgtcgtctccttctgggtcggcgcctttgcggtcaaccacggttaactaaataactaattgaatagctagataaaagtcagtggatgccactggctttttgtctgcttaagcaaatgtcataactatatcactatttatagccttgaatagatttaatcggttacataatgcatcacgcaggtgatatctcacaaaaaattaacaaaagcatcaggttcaaagattgttaagtcgatgttaaatagaactagcaagggtgaaagcggtacatttttttctttgttaagctaatgtaaactaagaaaaataacgttagaatattaaccgattttcgaaaaatggtaaagatttttccaaaatccggccagaatttaaacaaagttaagtattttactttgatttaacatttccccctgaatgtatttaacctccattaattactatttacttagtaagaattcaaggaggataattatgttaggcaagaaaactagagtagtggttatcgcacttgctctactggctatagtcgtcggctgcgttgttggcagttcaaaggcagacaccaagggtgtctctgggactgttaacgctgcggggtcttcagccctgttgccgctagtccaaagcgcagctaaatcattcatggatgaaaatccagacagcgtgatcaacaccaacggtggtgggtcaggccaaggtttacaacaagtctcagatggaaccatcgacatcggtgactctgacttgttcgcagaagaaaaattagacaagaagtccgcatccaagctggttgaccaccaagtggccatcaccgcgattgccccaatcgtcaacaaggacgccggggttaagagcttaaccacccagcaattgatcgatgtttacactggcaaggttaccaactggaaccaagttggcggcaatgactgcaagattgttttgatctcacgtcctgcttcttcaggtacccgggcaacttttgaacaatatgctttaaacaagactgccagtcgttcaaaccaatcactggaaactgacgactccggtactttgatccaaatgattcaaagcgttgaaggggctgtcggctacgttgccttatcatacttgactggtaacccagacgtaactgcagttgccatcaacggcgttaagccaactctggacaacgtttacaacggctcatacaaggtttggaactacgagcacatgtacaccaagggtcaaccaaagaaggctgctgttaaggcctttttaaagaagatgttaagtaaagaatacgaatcaaaggttgaaggcatgggctacggtgttgcttctaagctttcagacaaggctaagaaagaacacaagtaaaaggagagtgatttttcatggacaaggtagttcaaaaagccatcgctagcgataagcgctggcgggcagtatacattgcttgcgggctcttgattgttgctttgacgctcttgatgggggcattcctgctctaccaaggtagtcaaacctttatcaaggctcaccacagcatctgggaattcctgtttaccagcgactgggcaccgcttgacaagaccggcctgtttggcgggaaagtcggtgcagcagtttacatcgtaggttctcttgaaacctgtttgctggccctggttatctgcttgccatttgctatcggctcagcagtttacatgacggaaatctcaccaaagatcggtgaaaagtacttccgtccagctacggaaatctacgtttcaattccatccgttgtttatggttggtttgggatgaccaagctggttccattgattaaaaatattttccatccagccatgggtgggtactcagttttggccgcatccattgttttggccatcatgatcttcccaaccatcaccgcggtttccgctgacgccattaagtcagtgccaatgagctaccgtgaaggtgcttacggtttaggcgcaacccgctggcaagtaatcggcaaagttgttttgccagcagcttcaggcggcatcttgaccggggtgatccttggcttggccagagcgatcggtgaagccttagccgtagccatggttatcggtaagactcgctcatttgcggcaaaccttttgtcaccaaccagcaacttgacgagtgccatcgcagccgacatgggtaacactgcccaaggcggggaatacaacctggctctgtggaccatggcgctgctcttgttcatcatctcaattgtcttgattgtgctcattcacaaactggctaacggaaagaaggataaataatgaaccgtgctaagaaaaaagatcggtttatgaccggcgtcttttacgccatcggctggctgatgctagcattcttgctgtatttgacatttaccattatctttgatggcttgaagggctttagcccagacttcttaggggctgccggcaacgggatcttcaaccaattctttaacactctttacttagttttcctttcgctcttagtttccgtgccaatcgggatcggggctggggtttacctggctgaatacgccaaggaaggcaagctcttgaccatgctggaagtaagtatcgaatcactttcttctctgccatccatcgtaatcggtttgttcggctacctggccttcatcatgtggacgggaatgagctggaacatcgtggccggggccttgacgatctcaattttgtcaattcctttgatcactactgaaaccaacaatgcaattcgtgccttgccaattgaatacaaggaaggttctctaggtttaggtgcaaccaagtcagaaaccattagaaaagtcttgattccagctgctatgccgcaaatcttgactggggtcatcatggccgctgggcgtgggtttggtgaagccgccgctttgctgtacacgtctggtcaatccacttacatcaactggcacaacttctggaagattacttcacctacttcacctttgaatccattcagaagtggtgaaactctttcactgcacatctgggtcatgagaactgaaggggctttgaaccctaaggcaacccaaattgccaactttacttcagctgttttagtagtactcgcactgctctttactttagttacctgccgcatttcagacaagatgcgtaagcgcaataacggaggaaattaataatggaagacaaaattactatcgaaaacttgaacctttactacagtgatttccacgccttgcatgaccttaacatgcacattccaaagaatgaaatcacggctttcatcgggccatctggttgtggtaagtctactttgcttcgctgcttgaaccggatgaacgacctggttgaaggctgccggattgacggttcagttaagttagatggtaccgacatttatggcaatgaccttgacgtcactgttttgagacagagagtcggcatggtcttccaaagaccaaatccattcccaatgagcgtttacgacaacgttgcttacggtcccaagatccacggcgtaaccgacaagcaagaacttgacgaaatcgttgaaacctcattaaagcaagctgctatctgggatgacttgaaggaccgtttgaacaagtctgctttgggtctgtctggtggtcagcaacaacgtctttgcatcgctcgtgccttggctgttaagccagaagtcttgctgatggacgaaccaaccagtgcccttgacccaatttcaacttcaaagattgaagaattggctctgcaactgaagaaggactacaccatcgttatcgttacccacaacatgcaacaagccgtgagaatttctgacaagactggcttcttcttgctgggtgacctggtagaattcggtgaaactgaccaactcttctccatgcctaaggatgaaagaactgaaagatacattactggtcgtttcggttaaagaccagtaataattagatagagtaagaaaggcagaaacaatgactagatcaagatttgatgaagaattggacaacttgcaaaagtccatggaagacatcggcaagctgtgccaggaagccattttggaagcaaccaacaccttgtttacgggcgactaccatgaagctgaagactcagtcaacttgcaccgccgcatccacaagagcgaacggaaaattgaagacagctgcttgcgcctgttgatggagcagcagccagttgcgactgacttgcgggtgatcagttcttctttgaaggccgtttacgacctggaaagaattggggaaatctctgctgatattgcagaactcgtgttaaatgaacacctgtccatcgccaatgaccagctgaaccttaagtccatggtgcaaacctcaaccagcatggttgatgatgccgtaaccgccttgtccaccaagaatctggaactggcgcaagcggttatcgaccgcgacgacattgttgacgatgactttgaccatgcccgagaaatcctgatcaacaacttcagcaaggatggcaatccagaatacctgatcaacctgatgatggttgccaagtacttggaaaagatcggtgaccacgcggtcaacgttgctaagtggaccaagtttgtggcaactggcaaggccggaagataagtcttggaaagtttgctaaattaatattcttcctgatctatctgcatagcaaatgtttctaagctataattagagtagctatttgcagatagattagggagaatttttttatgactgaaatatggtgtgtggaagacgacgaaagcattcgcaaaatcgaaatgtatacgctggagtcgatgaactttaaggtgcgtggctttgaagacgggacgacttttgtcaaggccctggcggaaaagcatccagatctggtcatcttggacctgatgctgccagatgaagatgggagcgatattttgaaaaagctccgtggcaactcgtcaactgaagaattgccggtgatcatcgctagtgctaagacagccgaatatgacaaggtgaagaacctggattctggggctgacgattacttgaccaagccttttggcatgatggaaatggtctcccgggtcaaggcggtcctgcgccggaccaaccacaagaaagaagacaagatcgagaaagacgggatcaagatcctgctcaagcggcatgaggtttatgtcgatggtcaggaaatcgagctgaccttgaaagagtacggcctcttgaagctcttgatcacccatccagggaccgttttttcccgagaagaaattatggatcaaatttgggaaacgggcttttacggtgaaacgcgcacggtggacgttcacgtaagaaccttgagacaaacattgagtgaggctggtagccatatcgaaacggtgcgcggggtcggttatcgctaccatgaagggaattaatgtttaaaaaaatatttcgggcagtctttttatcaacggcagtcatgctggtctgctcggtggttttgagtgcgctttttttaggcatcgactatgatcacaatgaggtcaacaccttggcttcgcaggccgatttggcagccagcggggtcaacaatgggggaaggaagtacttaacccagctaaaaggagaaaattaccagattacctggatcaatgctaaaggcaaggtactctacgacaacgaggaaaacccagccaagatgggcaaccacgctaagcgcaaagaagttgctgaagccatgaaaaagggcgaagggcaaagcgagcgctacagcacgaccctgtcgacggttacgatgtactatgccaaaaagctgaaagacggcggcgttattcgggtggcggttacgcggaattcgatctggatgaccatcttgcaattgctgacgctgatgctgatcatcttgctgatcgccgtgattgcttcttggttcgtagctaagatgatctcgcagtccatcgtcaagccgctgaaccagttagacctggaccagccgcttgaaagcaagagctatgaagaaatcaagccgctgttaacccggcttgacagtcaaaacaagcagattgctgaccaaatggagcagctccaccaccgggagaaggagttcaagacggtcaccgatgccatgcaagaaggcctgatcttgatagacctgaacgaccaggtcctcttgtccaatccggcggtagtatcgctcttaggatcaaagtcttctgaagttttgccagatgatgttaaaaagatcatcgatcaagacaagcggaccgtccccaccgaagggatcgtggaaagagaagggcgcaacattcaaattagtgccagtccgattttttcacggaaggtcttaaaagggacttcgatcttggtcgttgacgtcacagaagaataccatgaagagcaggtccggcgcgaattcacggccaatgtgtcccatgaattgaagacgccgctgcagtccatcatggggtcagcggagcttttggaaaacaacctggtcaaggaagacgatcggccagccttttaccggaagatccatgaatcttcagctcagctcttgaccttgatcgatgacattatccggctgtctcacctggacgaaaatccggaatttgaagaggtccggatgaacctgaagagtccggtgaccgaggcgatcgaagccttgcaggcgtcagctgacaagcacgagattgagctgaaggcggctttggccgatacagaaatcaaggccaacttccgcttggtttatgaaattgcctacaacctgatcgacaacgccattcgctacaacaatcctggcggccaggtcaagattgcggtcaaggaagtgcgggggcaagctattttgcgggtttctgacacggggatcgggattccgcttgaagcgcaaaaccgcatctttgaacggttctaccgagtcgacaagtcccacaaccgcaagactggcgggacgggacttggtctgtccatcgtcaagcacgcagtacagcagtgccatgggacgatccgccttgaaagtgaactgggcaagggctcaacctttaccgtggtcttcccagctttaaagcatgaagacaaattatacagccaaaattgcttatttgatctatgataaaggtgtcgaaagaaaataagagctctatttaaataacatagacataatcatgggctaagtgtatataaagtgtaatttagaactatacaatatatacgtaaaatcttatgattaaaggtgaacagatattatagccactttttttaggattcgattaatgtaaaaattacacaatgaattaataaaaagcgccatataataagcaaaaaaagtcatttaaataactaaaataaactgagacctaaaagttgagactgtaaaatagtttgtgtaaggatgaatgattccttaaatttatttctttaaacattagaaaaaggagttcctttctcgtatgattggtttgaacaaaaaaaacacatacagaaagaagaactccttcatgaatgattttaccaaagattttgctcaagctctattcaatccagacaaaataaatgatttattgcgcaaagaactacaacaggctgttaataacttgctagaagctgaattgactgcctttctgggctatgatccctatgccagaaatggctggaatactggcaactctagaaatggtgcttatttccgcaaagttgatacgcaatttggcccaattgaagtgcaagtgcctcgggatcgcaacggtcaatttcatcagcacacgctgcctgactacaagcagcactcggatatcttggaaagcatgattatcaagctttactccaagggcgtaactaccagggaaatagccgatctaattgaaaagatgtatggcagccattacagtccagctcaggtatcaaatatttccaagcagatgattccaaaggttgaggcttaccacaaacgcaagctaagcgacaagtttttctgcgtctatttggatgcgacataccttcctttgcgccgagaaacgtttgagcgtgaagcagtctatattgccattggcattaaacctaatggacataaggaagtcattgactactgcattgctcctagtgagaacattgaagtctggacagagatgcttcaaaacatgaagtccagaggcttgaagcaagttgaactctttctttctgatggtgttgttggcatgaaaacagccttggccaggacttatcctaaagctcattttcaacgctgtttggttcatgtcatgcgcaatatctgcgctaaagtacgcgtcgacgatcgtgaaaagatcatgaacgaattcaaacaggtgcatcaacagacaaacaaagaagaagccacagctgtcctgcatgacttctataccaaatggggcaaggtttacagccatgttatcagaagcttgaaagacatagaaccagatctgctggtcttttataactatcccaagcagatcagagcttcaatttattcgactaacatgattgaatcatttaacaatgtgatcaagcgcaaagctaagcctaaggcagagtttccaactgaacagtcgcttgatgcttttattggtattcaggcaatgagctacaatgaccgttatttcaatcgaattcataaaggctttggtcaggttcaggacaccttagaatcctactttgattaaataaataattaaaaaatcaatttacgagaaagaactatttacacaaaagatttgacagtttctaaaagttagacacttttaggtctttttctacgtaaagtcaagcataataagaagtttggcttcattttttgtttaaatttcaacttaaacatcttttagtgtcgatttatttttttagttagacacgacaaataagcccagatccatatctgatttttgggcttagcgttataatgtacttgatcaattaattacgactaaagtctttttgattatgtgtggctacgttgtaatcatatggttgatcattgataatcagggcataaatggttctgattagtttatgaattgaagcaatagctatctttttgaaccctttggtttgagaggatagctttttgctttcataataatctgctatatgacacggatttgtcttagctgcattatcaatttgtccaatagctcgataaagcaacttacgtgcgactgcattgccatgtttagtaatacttaaattagagtccatttctcctgactgatatctgcctggatcaattccgataaaagcattgattttattaggattactaaatctgcgtaaatctcctaactctgctaaaactctgacagcagtggtctgtgcaaagcctggaatgctttctaggttttctaaatcatgattaggcaaagacttcgctaacttaaccattcttgcgattaaattttctctttgatcacttaaattaagcaatctgtgtgcataatactgcacttgctcgacttctatgctagagcaagatacaactggataagcttgataagctaattcaattaatttatctgcagtccttagagcgtgtttaaaagcaatcccctttaagctcattaaccagttaataagctgttttttatcttctcttcttactaagtcacaatgaggatatcgcacaactatttgccagtaatttttacctttagcagaagaaaataaattttcaatttcaggaaaagtcgattgtagagcttggtgaagtcgatttttagctattaccaagtcacttgtcagctggtcatagaagcggctcaaagcattaagctgcttataagtttgggattcgctttgattaaccggatggcgataaagtctttgaattaaagctaaatgataagcatcagttttatcggtcttgttgtagcgtagccccatattcatctcttttttggctttaagcggattaataacaacatattcatagccgtagtcttccagaaaagcctgcagtctgcgtgaataaacaccggtagcttcaaaaataatttgcggatgtttagaaaaagcggttaattcatgaagcaattgaataaaaccaggacgattattagtaatggttagttcatttttgctttcaccaattagttcacaaacagtagaagtagacttgcttacatcaattccaaaagtaacttgcataataaaaacctccaaaacttagtagtaaaacgtatttacttaagaaatcagatctaattttctaaactcgacatctagtgtccacattcttcgaagagactattgaaaacttaagtaaaactgccagtttattatgcgacatcaagtgtctaaagacctcagggcatatcgttttaccactactttaattctacaaaagaataaaaatagtgaatcaattatcccgtcggataactaattcactatttagcttagaatgtttactatgtctaaatttaataaagaacaaaaaatagaaatttatcataaatggaaagatgaaaatatctcaatcagtcaattggctaaagcgtacagaatgaatctagctaatttagactatatgcttagattaattgatatgcatggaatagaaattttaactactaaaaaccaaagctattccaaagagtttaagcagcgaactattgaacaagcaatctttggcaataaaccatacttacagctgtctttggaactggggtttaaaagtattggcatgcttaacaattggattagagaatataagaaaaacgggtataatgtcattatcaaacagaaaggacgccctgcccgtgaccaaagaaaagcagaaatctcgcaagaaactggagaaagagatccagcagctgaaagaagaaaacttgcgattgcgtattgtgaacgaatacgtaaaaaaactaagtgccttggaccaagaagatcagaagaaatagctagggtgattacggatctaaggcaagaattcaaagttagtttaaattatgtattagctgcgattgtagagcaccctgagctacctataattgccagaagctcatactacaagattatcaaacgacagcccgtcaagcctaaacggtcaaagcttattgctagaatccatgagatttttaatcatcatcaaggccgctatggatatcgcagagtagctttgcagttaatcagagagggctggaaagttacggagaaaaccgttcgctattggatgcataaattaggtcttaaaggcatcaggcgcaataagcgcaaatattcaagctataaaggtactattggcaaaatagctccaaatttaattcatcgtgatttcttcgcagccctgcctaacacaaaatggtatactgatatcactgaatttcatcttaataatgaaaagctttacttatcgcctattctagacggctgcggtggcgatatagtttcttatactatctccaaacatccagatatggatttagtaatgacaatgcttgacaaggcttttgccaaagaaacagctcttaataactgcatttttcatactgatcagggctgtcagtatcaaagccctcgttatcagcgagctttaaaactccatggtattactcaaagcatgtccagaaagggcaactccatggatgatgggctaatggagaacttctttggcctgctcaaaactgaaatgttctatgatcaagaatacaagtatcataatcttcaagaattaactcaagcaatcgaggaatatatcgaatactataacaacgaaaggataaagagcagattaaaaggcttaaccccgaaagagtatcgaagtcaagcctctattaatccaatattttaattgtctactttttacgtctcagtacaaaaattatagagccggttttttagtactgttttaattctatcatgattgtagtaatgaatgtattccttgattgcttgttctaattcacccatggttttgaatgtcttttcaaagccatagaacatttttcgtttaagaatgccaaagaagccctccattaagccatcatctaatgaatttcctttacgtgacatagactgggaaacaccatgatttttaagccaagcttggaaaacagcgtgctgatattgccagccctgatcagtatgaaaaattaacccattgagtgcaggatgcttttgataagcttgatccagcatgtccattacttgttttagtaccggatgacgatttaatgtataagcaacaatctcttgcgtacatccatccataataggcgacagataaagcttctctccattaaggtgaaattcagtaatatctgagtaccaatgtctatcaggaataattgctttaaaatttcgtttaattaaattgggcttgatttttccaacagtccctttgtagcttgaatatttaaatctgcgtctaattgcaatggcatatagatgcatcttggtcattaatcgtttaacacgtttatgattaactataatgccttcacgtcgcaattgggcagtaattctacgatagccatatctatgcttgtgctcctcaaatatttctttgatccgttccataatcttttcgttttttaaatctttatcatctttagttaaagtgtagtaataattactgcgtgataaatgcggaagatcaggattggagttaatcgtatcaagcacaaacttaacggttacgtggagttcttgccttagttgcgtaaccgcagaaactatctcttgtgctgttggttttcggttcttggggagactaaggcgctcaatttttttacaaattcgttctcgacagtaagtcttaagttcttctgtttgaggtcttttatttgcttctgaagctcttgaatctgtttgtctttgtccttcatgggtaggtctgcctttcttgtgattaatgacattatacccgtcttctttatatttgcgaatccaattgtgaagcataccttggctgggcagtcctaaatccaatgatacctgacgagccgtttcatgatcataaataactcttttgatggctttctctttaaattcaactgagtaatctttatagctattatcaagaatttctatcccatgacgttctattaaggcaatcagataaaacaaatttgtacgatttaccccatattccttagcagctaggttagctgatatattataatttttccaattattgtaaatatcaattttgtcttgtttggataatttagtcataataaaaacctcgaaattcttgtccgaatttcggggttcatatcatttgtttctgtagtgccttttttataaatatcaataaattttaggagtgtaataagattttagaattaattatgttcaactgctgttaacgtaatgactccaattaattcaagtgccaaaaatgtaattccaaggatagtaatcatagtgcccatctccttatctaggagataaataattagaatatttatcttttaattcaatcattgcttacactgttactgtaccacataattgcgtattatgaaagcgattacattaaattgggagaaaaaagttgacctccgaagaaatcaacttgtgcccctgccaaggacctatattatagcattcatttattctgcatgatcatcctttttctcagttgagtcaggattttgatcgtcagacttggtgaagtcaccattcatggtattaggacgaccagtttgataatcaactgtgtgcttttcagccttaggtgcgctttgaccaggttcaggcataaccatagcagcaataatatataaggcaacgccaggaaatacacctgtgaataatatcaatgcagcaccgatgattctaacccaagcaggatctagatcaaagtagttagcaataccgcccaaaacgccagctaaaattttattttgtgattttgtaagtcttttttgcatgataatcaactcgtttctaactgttctatctcttttacatatattatacagcaaaggcatgaaaaaagtgttgattgctcaacacttacacataattatgatgcccgctaaaagattcgaactttcactcagtcacctgaacagcgacctgaacgctgcgcgtctgccaattccgccaagcgggcaattttctttggtacatgaataatcataccaaatatttggtaaaatgtaagcataaaatactttaattataaaaaaggatggaaattcatgttttttagcaaaaaaataaaacgtgcagcaattaccacgattgctgcagtatcaattttttcttgtggtgcggtatttgcaactataccagttagcgcagatacaactagtagctatcaagctgatcaagttaaactaaatgtaaagtcagcaattgcaattgatagtgattcaggtcaaattttgtatgccaaaaatgcgactaaaactttgccaattgcttcgatgactaaattagtaacagtttatttaactctgcaagcaataaaaaatcataagctttcatgggatcagaaagtaaagccaacggctccgatagtaaaggtagctaataatgcagaatattcgaatgtaccattaaaactaggacattcgtatacgataagacaactttatcaagcaaccttaattgaatcagctaatggtgctgctatgctgcttggtcaaacaattgctggctcacaaaaggcatttatcgatcaaatgcgagctcaagtaaaaaagtgggggattgaagatgccaagatttatactgcttgtggtttacctaatggcaatttaggtaaagatgcatatcctggtgtaaataaaaatgctgaaaatacgatgtcagctaaggatatggctattgtcggtcaaaaattaatctcggcattcccagaagtattagaaactacacgcttagctcacttaaactttaaagatgctggtcacgtaactaagatggctaactttaactggatgttaaaggggctttctcaatatgatcaagcttatccagttgatggcttaaagacggggactactgatgctgcaggggcttgttttatcggaactgtacaacacaatggtgctcgtttactgactgtagtaatgggcgcacgtcaccgtgacggaacggatccagctagatttgaacaaactaaaaagttaatgaattatgtttttaccaagtatcgtcctgtaacaatgactgctggtagccaaatgaatggcgctaagacaattaaagttgttgatggtgataatgcaactactaatttaggacttaagcaaaagactactatctgggatccagctgatggcaaaactttagtggcatcattgaataaaaaatctgtagaagcaccaattaagaaagatcaaacagttggtgattatcaatttaaatctggtaatgaaaagattgtttcattgtctaatcctaatgggatgaacgtcaaggctaaggcattgtcagctaataacaaggtgaacttttttgtcagaatttggcgctggattttcggaggaagataaatatgactgaaatttctgaagatatcttgaaaaaggtaattaaagaaagagaaagcgatacacataaaggcgattacggtcgtgtactcttgatcggtggtagtgagaactatggtggcgctattattatgtctaccgaaggcgctattaatgctggcacaggtttgactgctgttgcaacacaccctttgaatttagcaccgttacatgcacgagtgcctgaagcaatgtttatcaactggcgcgatgctaagttagcagatttaatcaaaaatatggatgttgtagtttgcgggccaggattaggcatgagtgatctcgctaagcaaattttagttatcttgcgaagatgtacttcagaaaaacaaaccgttgtcttagatgccagtgctcttgatttaattagtcaggataagaacttattgccaactaatgctggccacttaatcttgacgccgcatcaaatggaatggcaacgattgagtcaaattcgtattccgtttcaaacagatagtgccagtattgatgctttaaaccaattgattccagatactaatgcgcttttagtactcaaatcgaatcatactcatgtttataatgggactggtcaaatttttgttaatccaattggcaatccaggcatggccactggtggaatgggtgatactttagcaggaatcatcggtgggatggttgctcaatttggcccaggcgttgaaaccgttcaagctgctgtctatcttcattctttagcaggtgacttgcttgccaaagataattatgtggtacgaccaacggaactttctaaagtattgcctaaattgatgaaaaagtattcagaattggcataaacatgttaaaattctaatagtaaataaatgcatccctagttgagggatgttttttaacgcttcaaagacgaaaaagcataatataattgagttaaatattaataaaaaagaagattaacatatttatgaaaaaaaacattattatcggcgtaactagtatcgttctagcttttggtgcaattatcggcttagctaaggtatgcgcacctaagtctgatgtctcacaagaagctgctacaacgcagactaaggccaaaactaagaaaataaataaaactaagaaaaaacaaactaaaaaagtagataatggtgctttatatcgaccatatagcgatcctaaggacttgcgcaaggcaggcacttggaagaaaaagagtgagcctaaaaaatatcctaagattaagccatatgaaaaggatttgactttgcgggtatcattaaaaggaaaccggacctatttgttaagaaaaggcaaggttttgtataccatgttatcaactggtggaatctacaagaagggcaagtcattgaccccaactggaacttttaggatccaaaatggtcgtggagacagctttttcaattataacttaggtgaaggagctaataattggactagttggagtcctgataacgtgtacttgttccactctgtgccaactaaagctgattatagctataacttaaaagaagcagtcaaattgggaagaactcaaggttcacatggttgtatccgtttgagtgtacctgattctaagtggattatggatcacatcccagatggtacgaaggtaatcattaaaaataattaacaagaacgttgctttttaagcaacgttttttaaaaaattgcagtaaaaaactttgttcaaagcgttcaagattttaatccaactcaagaatggtttttttaaccaaattagtggcagaagccgttttttcctgctataatcatgtttgccaagaagtcaaaagtagtagttattttctttttaagcgagtctatgttggtgcaagatagatactagaagataatgaaggcgtgtttgactgataaaatcaagaatttaaataagcggatactttgtatcaatctgagtggtaccgcgggtttttaactcgtctctttctacatttgtagaaggagacttttttatttagaagagaggaataagatggactttaagaatgaagtagttgacttggttgctagtcaagttgatttacctaaagaaaaaattgctgcattaattgaacgccctaaaaatgctaagatgggagactatgctttcccagcatttattttggctaagactttgcacaaaaatcctgcagaaattgctaaaaatattgcggataacttatcaagtgataatttcgctaatatccaagcagtcggtccttacgttaactttgcgattgaccatgaaaaattagtttcatcgactttgaaggatgttttgactgaaaaagaacattacggtgatcaaaagattggtgaaggaaatgtgccaattgatatgtctagtcctaacattgctaagccaatgtcaatgggccaccttcgttcaactgtaattggtaattcaattgctaagacaatggagaaggttggctatactcctgttaaaatcaattacttaggtgactatggtactcaatttggtaagttgattgctgcctacaagcactggggtaatgaagaagacgttaaaaaagatccgattatgaatcttttccactactatgtaaagttccaccaagaagctgagaaaaatcccgaacttgataatgaaggtcgtgaatggttcaagaaacttgaagacggggatccagaagcagttaaactatggaaatggttccgtgaggtttcattaaaagacttcaagcgaatttataaagaactaggcgtaacttttgattcatacaatggtgaagctttctttaacgataagatgcaaccagtaattgatgaattaaaagaaaaaggtcttcttcatgaatcacgtggtgcgcaagttgttgacatgggtgaaggtgaaaatcctgctattatcgttaaatctgatggtacttcaatttacttaactcgtgacctcgccgctgctgaatggagaatgaaagaatataacttcgttaagatgctttatgttgtaggtaacgagcaagcccaacactttgttgaattgaagactgttttgaaaaagatgggttatgactgggctgatgaaattcaccacgtaccatttggtttaatcacccaaggtggtaaaaagttatctactagaaaaggtaacgttgtcttcctcgatcaagtattaaaggatgctgtttcacttgctaaaaaacaaattcaagaaaagaatccagatttagcagatcaagatcaagttgctcatgatgttggtgttggtgccgttgtcttccacgatttgaagaatgatcgtttagacaattttgactttgacctagaagaagttgtgcgttttgaaggcgatactggtccttatgttcaatacactaatgctcgggcacaaagcgtcttacgtaaggctgctgcgatgggtgaaaatcctagcgaaactgatctagctcttgatgatgactgggcttttgccgtagccaaagatttagcagatttcccaagaattgtagctagaagtgccgaaaagtttgaaccttcagtaatagctaagtttgccttagatttagctaaaaaattcaataagtactatgctaatgtgaagattttaaccaaggacgataaaattggtgctcgtctcgccttagttcaagcaacatcaatcgttttaacggaatcacttagattgttaggtgtcaatgctcctaaagaaatgtaagagaaaaacaatgaaaataagaaaatagcgcttacattctgtgaaaaattgttcatatttcaattattagggtacaataggcatgtaagatatttaggaggtattttttaatggcttattttgacaacggtaatcaaatctttaaagatgctcgtaagaaccattacgctgtaggtgcttacaacactaacaacttggaatggactcgtgcagaattacgtgctgctgaagaaactagaactccattgttgatccaagtatcaactggtgctgctaagtacatgggtggttacaagttcgttaaggacatggtagctgaccaaatggattcaatgaacatctcagttccagttatcttaaacttggaccacggtgactttgaatcagctaaggaatgtatcgctcttggttactcatcagttatgtttgatggtcacaagcttgatactgaagaaaacttagctaagactaaggaaatcatcaagttggctcacgaacgtggtatttcagttgaagctgaaattggtaagatcggtgaaaaccaaggtgctgatggtggtgaattagcatcagttgaagacgctaagagattcgttgctgctggtgttgacaagcttgcttgtggtattggtaacatccacggtgtttacccagaaggctggaagggcttgaactttgaccgtcttaaggaaattgctgaagcagttccaaatgaaccacttgtacttcacggtggttcaggtattcctgaagaccaagttaagaaggctatccaacttggtattgctaaggttaacattaacactgaattccaattggcattccaaaaggctactcgtgaatacatcgaagctggcaaggacttagacaagggtaacaagggttacgacccacgtaagttattgcttccaggtactgaagctattaccgatgctatgaaggaaatgatcggttggttaggtactaagactatcgatgacgaacttaaggatgcttcattcgaccgttcatcattaaacgaagaataatcatttgataattatttaaataaagtctagcgtttgctaggctttatttttttaggcaaatttggtgataacttaattgaacttattataaaagaaatataaaacctgaattgtcaaattaagtgcaacagttaggctatgaggaaatatattgcttgaagagttcttctgctgtgtgatattgaaggattcgacgatgtttgcggttaatggcatcagttgcctgttgaacataagcagctgacttatctttcatgcttttgcctttagggaagaattgacgcagaagtccattgcagttctcattggtgcctctttcccatggagaatatgggtgggcgaagtagatctggcagcctttgatcttggtcatatccgcaaactcagagccattgtcaaacgtgatcgatttaaaccaggcaggatgtctgtcaatctcattttgaagcagcctttggcatgtgcttgcccgatagtcaggaatcttgataactacttcaaagcgtgtggttctttcggtcaaagtcattaaagcaggctgattcttgcgtctgacgcctttaaccagatctccttcccagtgcagcggcgtttttctgtcttcaatctctttaggacgctgttcaatggaattgccaagatgcttcttgtgcaaagcatgaccgctatggccgtgatgacgcttgttcctgcgtcttttgagcttcataggcagatcaatattgcttatgtccagcaagccctgatcaatatagcgatagacagttggtgtgctgggacaagggtagcctggcatagtccttttgaattcaccaacgaattcatcgatgctggtggcatcaaatttagctttaaagcgtctggagagcattctcaaaaagacagcataatgcttcaatggattgcgctgatagcagtttttgcgacgcttctcataataaatctgtgcagtatcagcgtaatagtgctcatacaataaatagctgctgtctctttgcaggacacttccgcgtttgatttcgcgactgattgtcgacttatggcagccgacttcttgagcgataacagtacgggaagttatgccggaatccagcattgcttgaatttgtccacgttgtacgctggttaattgatgatagtgcttagaaatgctagaatttgaattggtcatgaagatcttcctttcttgatttttcgtcacttcaagtttaggtcttcatggcctttttgtttaacacttagtgttgcacttcaattttaaatccgggaaagaaatataaaataaaaaattgaattataaagaaagtataaaaagagacttttatggaagcaaaaatgttaaatccatttatgcctaactttggtcgttttcctaaaattattatcgatcagcaagaagctttaactgattatttaactgggttgcaaacacatgatgctaagtatcaaacttctttagtttatgtcacaagaggatcaagaaaaacagttttccttttaaatgttcaaagatctttagaagagttagataattggatatttattcgtttaaataatggtcaaggagatttgctttttcaattaatgcatggtttgcaacgagttgcaggtatttcgttagttgacttgttaaaaagtgttaaaagtttgaatattatgggaaagggaattactgggcaagcactacaagaatcacagcaaattgattatgatgagtatatttcaattttgctaagtcgtttaaaaaagcagggtaagtcaattctaatcggaatagatgaaattgaaattagtgacgatgttcgggcttttggctcagaatatcaaacattgattggtgatgaataagatatttcattattgatgacaggattgccaagcagaatatccgaagtacagaatgaataataccctcacgtttttactatgtagtaatcgtgtttatttatcaccgttggatgaaaaaacaatagctaatagctatgagaaagcatttactaaaggaaaacgtgaaattgatttcatggtattggatgaaatgagccgtgcagttaaaggctatgcttatgcctttcaaacgattggttattatgcttggcgatttagtcgggaattattgcagttaaacgaagaagttttgaaacaaacaattcgagctgcaaaaaaggacctttttaggaatgcctatgaaagaatgtatatggatctttccaaaactgatcgcgattttatcgaagcaataatcaaagctggaaccgatcgtgtcacgacaaaacaattgcaagatatcttaaacaagcctattaattacatttcggtctatcgtgcaaggctgttagatgatcaattgattacatcccctcaaagaggagtagtacaattggcgttgccattttttgcagagtttgttgaaaaatctaatttagaacatttatcttagaaaatgagcaaatataataaattatggcaatatatcaaagataataaggctggggactttgagctttcttttgatgagcttggccagcaggctggggttgccttagatcattcctttttgcgttataaaaaagaattaccagcttatggctttgaggtgcaaaaaatttcattgaagaataaagtggtgaagtttcatcagttgtaatgaaagctattaataactaaagtagtagtttgcgataatatcttcaaaattagtaactatgttttgttttagaaaaagactaagatgtaagtaaaaaatgggaggattaataagttactatgaagaaggttttatcttggccagtatattatcaactatcagagatttatacggcgccattaaatgtaatttggtttgtcttgggcgcggcaatgtcgtttcaacaatatcacatgtttaatttgattaacattttactgtgcttagtagatgtttttctgtttgatttagcagttaatattgctgataattactatgattatcttcatggcaaagatcgacattttttgactgatataaatccaattggtcgtctgaagttacctttaactgatgttagaaacttagtgtggattagttactttatttcggcgattccgggtattattttggtttatcgcaccggctggccagtactaataatgggagttgtaggatatttcattggaatattttacactgcgggtcctaagccactgaatgcaacaccgatctgtgaattagtggtatctttttttatttcgtatttcattatgctagtaagcatctatgtcacaatttacggcacttatcctttgacctggaacttagcattaactactctgataagatgtttgcctttaacactcattttctatgctttgcagttagctaataatacttgtgatttgcatgaagatttaaacaatgggcgccatactttagccagttatactggtaaaaaatatgctcttaaaataattaagacgttgattattgcgggattattatttccaattatcgttgttctttttggtttagcaaaatggccattgatctttagttgttttttgttgccaatattatggccaaaattaaaacaattttttgagcatccggataaacaaactacctatttacaaatgattaagtatttatcaacgcgtggtgctagttaaatcgttctagacaataagccaaattataagctaaaattgcaatttccaaccggctttgaaagcctatcagactacgtgctcgattgttctcggcattgtaataggtcagaagcgaaaagtcgctttcaattgttctgcgaatagccatcaattgatgatcattgtgctttttagctcctgtcatatttttacgatatggtgtccaaagttcataacccatttgttttagctgttgatgcagttctttgcctaaatagccttcgtcgccaagaagatagtaattagatggatgggtattttccagcagttcaactgtctccctggcatcatgaactgatgcttttgttacgacataatcaagaatgtaaccgtcatcgctaacaatgacatgaactttgaaaccatagaagtaaattttcttggtggccttataaccaatgttggcataaccgcgaaaaattttagcacgatagtttcgaattggttggcaaacaggtaccggaaagctgtcaatgatcaagaactgtccattcaggtcaacctttttattcatttcttgccgtatctgataaatcaattgcaatagctgacgtgaacgtcgattaaaacgtgagtgtgataaacaattgaaacattcacagaatcttctttgtgattcaattcctgtcttagcttgccagataagtaaagccaaaatcagactgtccgtagttttaatttgatcaatatttcgccgatgagtaaactcagccggtgcatacaaacgataccagtgccgacaaattatcactaaatctttaaaactaacttgtaaatggtggctaaaacgcttaagcttaaggcagttcaatcagatcaggctcttttctattattatacaagttgagtctaacaagattggacttttttattaactaaaacgatttaactagcaccacgcgtatttatcaatatttttcattacatatatagctatttatacagttttggttttagtttagaggaaaattatggctttgaatatcatagatagaggattacactcattgataatgaggggggaaaataattatgtttggcaaaaagaaggataagaattcagaattttcaccagatattatgactttaaaaaatgcacttgaggaagtacgttttacgcccgaagttgagcatgacgcagaattaattaacatgtttgacgaagcaattgataaagccgagaagggtgaatctgttcaaacaatttatggtcgactcagttatcaaattacgcaatatattcaaacacatcatttcaaggcacccaagccagtaactgaattcttacatggaagtactggaagcgtagccacgggattgacttcagttccagtttcttggaatacagtacattaggaattttttatgtgcataaaattgacaaatactgaaaaataattgattaattaaacagagtagcaggtaatactactctgtctttttattgcaaatatgatgtcaaatgcgaaactgtaaaatagtttgtgtaaggatgaatatttccttaattttattttcctgaatattagaaaaaggaatccttttcccgtatgattgatttgaacgaaaaacatactagaaaagagattccttcatgaatgattttaccaaagatatggctaatgctctattcaatcaggataaaattaatgatttatttagacaaaagctccaacaggctgtcaatgacctgcttgaatccgaattgactgcctttttaggctacaatccttatgagcgcgatggctggaataccggaaattctagaaatggtgcttattaccgcaaggttgatacgcaattcggacaaatagaaatcaaagttcctagagacagaaacggtgagtttcatcaacacactatgccagattataaaaggcatactgatgttttagagcaaactgttatcaagctctattccaagggcgtcacaacccgagaaatcgctgatttgattgagaaaatgtatggcggctattattctccagctatggtttccaatatttctaaagaaatgattcccaaagttgaggcatatcatcagcgacatctgtcagataagttcttctgcgtttatctcgatgccacctatattcctcttaagcgggtcactcatgagcgcgaagcagtttatatcgccatcggtatcaaacctaatggtcataaagaagtgattgactactgtattgcgcctactgaaaatattgagatttggagcgaaatgctcaaaggcttcaagagtcgcggccttgaacaggtagagctcttcttgtctgacggagtagttggcatgaaagaggctatctgccagtcctatcctaaagcgcattttcaacgctgcttggtacacgtcatgcgtaatatcagtgccaaaatgcgggttgacgatcgaaaaaaagcactggatgaattcaagcagattcatactcagtcaaacaaagaaatggctgtacaggtgctgcatgaattctatcaaaactgggaaaaagcctacaaaaacgtagttagagatcttagacaggttgagcctgatctgttaaccttttacaactatccgccagctattagagcttcaatttactcaactaacatgattgaatcctttaacaacaggcttaagcggaaaaccaagcctaaaacagaatttccaactgagcagtcgcttgacacctttattggagttcaggcaatggattacaatgaccgttactttaacaggattcataaaggatttgggcaagttcgagacaccctagaatcctattttgattaaaagataaataaaaaagtcaatcaacgagagagattatttacacaaacttcttgacagtctccaggattgcattactatagtttatgtaaattatgaataggtagtaagtaacttatgaatttcaagatattcattgatttaatgaggagaacgaaaatgaaaattttcaacaagaaaaacttattattgtcatctgcagttgttgcagggatgctattcacagttggtactaaggctgttcaagctgatacaaccgatagttcacaacaagcaactacaaatactttaaaggtaaatgcaaatactgcagttccagataagaatttgattacgccagtagctagccgtgataatcaaactcttcgtcaagttgcagaagcaaacaacacttcattaagtgtattggaaaagttgaatgataatattgatccagataaaaccattgctaatggcacgccattatatcttccacaaaatgaagatttgtcaggactatttggtatatatcttagatcagatacttcagttccaagctcattaaagagaaaatattatgatagtctttcagcaaaagagagagctgctaagatgtggattattgcacgtgaatctggtggaaattacaatgcaagaaatggtatctatattgggcgttttcaattaacaaatacttatttaaacggaaattatagcaaagcaaatcaagaaaaaacagccttacgatatgttaagggacgttatggttcatggtcggcggctaaaagattttggcaggctcacaactggtattaataaataaaaggaaagtggaaaaattgaaatttcaaaaattagtaactagtgtattattagtagctagtaccactggtgtattaatgactgcacctaaacgggttcaagctgtagctgataccaatactactgagagtggaaaacccgtcgcaaatattgttaataagcctaacctaacaaaacaaggttatgtgttaactattcaagccccatcagggaagatttatgtagggcaaaagaattacaagaaacaattaactactactaagccaatatctaacgcaaaatcagttagttggaagaaaattaaaaacgttagatttagaattgaaaaagttgcttatgcgacaaaggttataaaatttggtggagcaccacagtatctgcttgtctctaaagataaaaaatatagttgctggacaacgcgttattctattaaatactatttttggaatactaaaaagatgcaacaagtaattaagccattgtctaaattgacaactagaaactcttcaagcctaaagaagattcggaataagcaagattttaatcaagctgtattagctgctaaaagattacctgctaatcaaagaaaagttgtcttagaatctttgaatcaagtgaaaaaagttggcaatattgataaggctgaagataatattttgttgttcagcttttagtgatatttctagcacagatttaaaattaatataaaactgaagttagaagaatttatttaatgttgagggggaagaaattgtgagaagtatatctaaaggcattgtatctttgatagcagctacaatgttattagcagcaggggaagggatagttcctaatactgttaatgcttctatgctagattcggctaaaagtagccagaatagtcaagaaagtagtagatacacttggcagagtgttaagctaacagatggaactgaaatgcaaattcttccagataattcttcaaaattagctggaaagattaaatataacggtcaaatatattcatatcgcattgtttcaaataatggtgtatatactatttatttgaataatgaggaagtatattcagttgatataaataatagccagttacctacgacaagtgtaggtggttttgatccatttattaattttacgtacgcaaatggtaaggtagcatttaaacatgcaggtagaaagtattattatttgacgacagagaaatatagtgcagatacggtaagaagactgaaaggaactactaaggatattattattggtttgcttggatttgttcctgtagttggcccctatgtttctgccggcggttttgcctatactgtttataatgatatttttggaaagaatcctaaaaataaatggtatacgataaaagaatattgcactagagggtatgaatattatgcttggaagacctatacttatactgactctcatagaaaacatctacaatctgttaaatgggagtataaaaaagtattatgagaggaattttaactagtagagttgctagaggcatattagcgtttatatttatattttttacgggttggtctgctgcaagattaatagtacagatagaacgttctgaatcgatatatgactaccttattttgggaggatttagtctagttttaggtattttggaactctatagattaataaatagtaagtaacctgaaaattttagaaaattgaacgttaacgtgaatatcaatataacacgcttagcttaaatagtcttattagtttttataattcagtaagataatcggcaaattggtaatatttagttgtagtcgcttcaaaggataaaaagtattcaacttggattactcaagctttcttgcaatactactacctaaacagcaagtctatgcaaggtgtgattaagccactcaagcgaattgctaatagattaaataccagtctgaagaaggcaaacaacaaacgtgactttaacgctgcaatgaaagctgctaagaagttacgtggcagtcaaagagattttgttttacgttcattgaatcaacttaagaaggatggctccatgaatgtagaaggaaagaacttgttattgtttggcttataaaattaagatattaagtagtaaagctcagcagaattgcttgagctttatttttttgtgaacggcagtcgacaaacagtataatgaacttatatcaaaagcactgaagttatttagaaaagaagatggaaaatggctaaaaaagttacgccacgcttggtattagcgattttgtcggcagggatgctctcatttttaggaatattggatgaaacggccacgacagttacttttccaacgttaattaaagaattttcgattactactgatcaagttcaatgggtaaacacactagtcttattggtaattgcgaccattgtgccaattagctcacagattagattaagaatttcgactaagaaaatttttattctaggagttcttttgtttactttggggctaatcatcgatattttatcaccgcgctttgatttattgttattaggacgggcaatgcaaggagtcggcacggggattggcttaccgttaatgtacaatattatcttggctgaagtacctaaagaaaaactaggctttatgatgggaatcggcactatgattactgcctgtgtcgttgccttagggccagtttttggcggaatgattaccgatgcacttaattggcgctggatcttcattatttcgctatttttaatgaaaaacgcccggaaattccccgtattttaatgcggggatggatagggccaagctgacctaatggtcagctttttttattaaaaaatgaagacatatgttcgactttcctgtaaaatataaatatctaatctacagaaggaggtgaaacacatgaagagaatgagcagtttagcctaccattttggcttgaaagtacgcttttatcctagttctaaacaaaagaaaatcatcaagctaaattatgatgctcagcgttttgtctacaactcttatgtaggacgtaatcggaacaattatcgggctaagggctacttagctgttagacaatatcaagtaatgccttttgccttttctgttcttaataattatgagactaagctagcagaagaagtagtcgccaataatgagttattggctaagccaaagaacattcgcgatgcctatagctttttacgcgttaaagaaattgacagtctcgctattgccaatgcgattcaaaactatcagaaagcttggaacaactatcgcaagcttggtcatggaattccgacttttcacaaaaaacgtagtgattggtcatatcagaccaactgtcagtatcctaaacagacagaagcctttcttgataacgggacagctagatttattgatgctaagcacgttaaattgcctaagctaggcgttgtccgcattgccagctttagaaaattgattaaagagcgtttgcttaatcatatcccaactagaattggcacagtcacgattaaaaagaccgctgacgaccagttttacttatcaatgcaactaggcagcgatattgcctttgttaaggaattgcctaagacgcagagtcaaattggcatcgacctcaatcttgataatttcttaacagcatctaacggagcaatggtggctaatccacgattttatcgcaaaaccaaaaagaagcttgcccatgcccaacgtgtcttgtctcgcaggcagcgcagagctaagaaagagggacgcaatttgcgcttagccaagaattatcaaaaacagcgtctagcagtcgctaaactgcacgataagattcgcagacagcgaaatgacttcttgcaagtactctcaactgcactaatcaaaaaccacgatttagtagttgccgaggaattaagaagcaagaacctgttaaagaatcatgccttgtctcaagctatttctgatgttggctggcgcagttttctgaacatgctggcatataaggcagacctatatggcaaagagttcaaaacaattgatcctaagtacaccacccaaagatgccatcaatgtggcagtattatgggacaaaacggttataagaaattaacgcttaaggatcgagaatggacttgtccaatctgtcaaacgcatcatatccgtgattggaatgcggcagtaaacatcttagaaaaaggcttaggcaactggcagaattctaaaataaaaaaagcagcctaagctaggctgcagtccgctcgcaactcgcggactcaaaaggctttggtaattagacgacctctatcggcaatagtcaaaagattattgttggtaagtcaagtccgtatctaagcaagttggtgttctggttagcgcaagctaacgagccagccaccaagccccagaatttattctggggtagttgacttatcttgagtctatttacgggaagctattcaattcggcagattaatccgcttgaaaaagtgaagttcaagtatgtgcaatggctatctttggctattgggctggtctgtttaatgctgggctttacacggattgctaaacattcatttttctcaattcaagttttgggcttcttaattctaggaattattagtttattaatttggctaaaaatatcttggtctgataaggcggctttgattagtccgaaactgtttaaaaatttacgctttagtatgcagctaatagcttattgttttgccaaaattgcaacgctagctttgggcttcatctttccaatctatgttcaggctgtcaatcatggttctgtttcattagcaggctgggttactttccctggtgcggtaattaacgcgctaatggcggctgtagcgggaaagctgtttgataaaaagggtgcgcggctgccgattattatggggataatcgctagtttgattttgatgaatgttttagccccattaagcaacctggcaattgtcttgttatacgttctttattatggcggatacgggatgtgctttggcagtttgatgaccagcggtttgatcactttaggcaaagaaaatcatgcacaaggtaatgcgatttttaatactttgcagcaattttcaggtgctttaggaacagctttagctgagaccttgattgcgctagcgcagaataaatatctgactaatggcacagcagtcggttctaagtggacatttatggtattactgattttgataattattaatttgctcttggctcttgcctttgtgccgaagaagaaatgaagggaagttcagcgaaagctggacttttttaatttaaaaatatactaactctaaatacgcaatatttgcttaatatattaaacaaaattataattattttgattaatataaattacataggagcaaaacatgaatccagatttacttgcggcacttattcttgaaggtcagaataatattaaaaatattgctattattcctcgtgattatcattttgaaaatagtttaaattatgtgttagtaggtttgcggcgggctggcaaatcaacgctattatttaaaagggcgcaggatttagtgaataaacaaaatgtggattggtcacaaattgtttacttaaattttgaagatgaacgattagatggttttcagttggctgattgtaataatatcttaattgcagccaatcaattaacaactaagaagcattattttttatttgatgaaattcaaaatattgctggctgggaaaaatttgctcgtcgtttagcagatcaaggtgaaagtgtttatttaaccggtagtaactctaaggtgttgggtcatgatattgttctgcggctgggtggaagatatatgaccaaatatgtggcaccttttagttttacagaatatttaactgctaaaaaaattccacatgataaattatccgtcttggatacagttaataatggccaaattcgtgctgccgcaaatgaatatctatgttatggtgggttgccagaatctattatcttaacagacaagagaaattacttaacaagtatttatcaaaatgtatttttagctgatatcattgtccgcaataagattcgtaatgaaaagacgatttcattattacttagaaaaattgccgatacagtaatgcaccaagtttcagaaactgtcaaatcttttgtgtaaatagttctttctcgtaaattgattttttaattatttatttaatcaaagtaggattctaaggtgtcctgaacctgaccaaagcctttatgaattcgattgaaataacggtcattgtagctcattgcctgaataccaataaaagcatcaagcgactgttcagttggaaactctgccttaggcttagctttgcgcttgatcacattgttaaatgattcaatcatgttagtcgaataaattgaagctctgatctgcttgggatagttataaaagaccagcagatctggttctatgtctttcaagcttctgataacatggctgtaaaccttgccccatttggtatagaagtcatgcaggacagctgtggcttcttctttgtttgtctgttgatgcacctgtttgaattcgttcatgatcttttcacgatcgtcgacgcgtactttagcgcagatattgcgcatgacatgaaccaaacagcgttgaaaatgagctttaggataagtcctggccaaggctgttttcatgccaacaacaccatcagaaagaaagagttcaacttgcttcaagcctctggacttcatgttttgaagcatctctgtccagacttcaatgttctcactaggagcaatgcagtagtcaatgacttccttatgtccattaggtttaatgccaatggcaatatagactgcttcacgctcaaacgtttctcggcgcaaaggaaggtatgtcgcatccaaatagacgcagaaaaacttgtcgcttagcttgcgtttgtggtaagcctcaacctttggaatcatctgcttggaaatatttgatacctgagctggactgtaatggctgccatacatcttttcaattagatcggctatttccctggtggtcacgcccttggagtaaagcttgataatcatgctttccaagatatccgagtgctgcttgtagtcaggcagcgtgtgctgatgaaattgaccgttgcgatcccgaggcacttgcacttcaattgggccaaattgcgtatcaactttgcggaaataagcaccatttctagagttgccagtattccagccatttctggcatagggatcatagcccagaaaggcagtcaattcagcttctagcaagttattaacagcctgttgtagttctttgcgcaataaatcatttattttgtctggattgaatagagcttgagcaaaatctttggtaaaatcattcatgaaggagttcttctttctgtatgtgttttttttgttcaaaccaatcatacgagaaaggaactcctttttctaatgtttaaagaaataaatttaaggaatcattcatccttacacaaactattttacagtctcaagtttcatatgcaactttgtataaaaatataaaaaatgtgattagtacggtaagtcgcaattcgattattgattatatcgattacgctaaggatgcatatttgttattttccaccaaaaattattttgctaaatttagtgagcgtgaaagcagcccaaagtattattttacagataatggcattttaaatttgttttatctggataaattgccagcattactagaaaatctagttgcgatcaagttgcataataaatatcaagagaatttattttatttaaaatctcaaaagacagggatagatattgatttttatgtaccagctagtaaaattgcaattcaagttgcatgggaagtaaatgatacgtcaaaagaacgtgaagttgggaacctaattaaattagctgataattttgatgaagttgaaaacttaataatcgttactcatggtgaagaggctgaaattcagcaagaagataagataattcagttaatgccactatataaatttttattaatgagatagtttttcgataactcataaaatggtaatgctcaaaattttttgagcattttttataactataagatctaaagagatataaaaatggacataagatctaaagagatataaaattaaagccaacaactaaaataatgaaaataggtgaacatcaattatgtctgaaataacgaatccatttgaccctaactttggcaaagttcccaaaatatatttggggcgacaaaaaatagtagaagatatagtaagatcacttgaaagtggcaccggaccctatcaaacttcaatgatctatgggatgcgcggggttggtaaaacttcattacttgctgatattacctcaactttagaacaaaaagataactggattgttatttacttagccatgacaaatgatttgcttgccacgctcatccaaagtatttatcaagaagcagcgaatccagtaaaaaaggcgttgaacaaaattgatggtgtaaagttttcggcttttggctttgaattggaagttcatatatcaaatcctcaatctacttatcaagtgttacttgaagaaatgttaaaagttttaaaaaagcatcaccaatctttattgatagcaatagatgaggttaaagaaactcctgagattgttaatttggcgtctatctatcaaattatggtgttaaaaaagtattcaattaatatgatgatgactgggctgcctaagaatgtttctgaactccaaaataatgatgtattaacatttcttttaagaagcggtcgtgtaccattaggaccacttgatcttttcgatattaagtatcggtatcaaaaagcatttgaaagaggtaataaagagattaataatactgccttaatgaaaatgactaagctgactagaggttacgcttatgcatttcaagacttgggatatcatgtttggcaacattctactgatcaggtaacagatgaaagtattgaaaattcgatctcatcgtttaaaaatgatctgtttcgtaatgcttatatcaagattatctctgaattatcgccagtcgatcgaaaatttttattcatcatggctcataatgataaaaatgttgttaatataagtgatattcgcaagcaaatgggaaaaagttctaattatatttcgcaatatcggcagcgattaatggatagtcaggtaatcattgatgcaggatatggcaaagtggcattttctctgccattcatgaaagactttttgttagaagcagaagaattatatgaaattgataattaacgaaaaaagctgctaattaaactcttcgctttcgtccaccaaacgtgtaagcaataagccgaagtgaatgacaagatccaggttaacagcaagattccaaagaaagttaagaatgggtggtaaatggcgtgatattgcatgttaagaccgcgccaaactaattgattccagaagacattggataaatatgcgcgataagcataagtagccaagaaatggaatacttttaaactggtttgcgaattttttctaacttgatgcaggcaaaaagctgaaatcagtgcaattactgctaaacaataaagagtcattgacggcttgtaatatggtgcattattgaagttgattggataaccgaacttgtgcaactcaacattagtccaaatgaagcaagcaataaataatatggtaattacccaccaaaacttagtgaccagctggttgtaataaccacgcaatcgccatgctaagacaccatacacaccatagatgaagaatgaaataaaaatgcggtcgagtaaataccagtcatgttcgtgcatgccatggaagacattgtaatcatagaaccaaagccagacaaaatagagtacgaaagtgattactgcaatccaaatacctcgagttagattgtgtcctacatagcggcttaatccccagaaaagcggcattaaaatgatgaattgcaacatcatcgtgttataccacaagtgcggggcggcgttcccattaatgaattgccagcagaatgaaccaagattgttaaaatggttaacttgttgcagccatggcatccctactaggtagattaacgtccaccaaatagtaggtacaaaaagattagaccaatttgtctgcatatgttttgcataagaaaaactatttttttcattattagtacggattgtggtatacaaaataccaaaaataaaagctggagccgtatatttgactaaattataaaaaacgccaaaaacatcttgtgtgtgaaccggttgttctacgtccatgaccagcgacataattggctgtgagattactgcgctgcaggcgaatacttttaaataatcgccaatatcagctatttgatagcttttaaattgatctgttttcatgaacttgctctcttcttttcctaatattattgtgtcatttttttaaattaggcgaaaggataatcatgttaaaattagtttagctattttggaaatggggtcaaaatgtcagtagaaaagatcacacaaaacgcactaaaagcattgctttatgaagtagttaccaatcctaagccaggtttagtggatccagttgacgtggggtctcatcctgatatgaatgtgtatttgtttattaatagcagtttgagtttagaaaattattttcggcaagcagctaaaattggagcagattttacggggcaggatttgcggcaaatgtttgaacaattgcgtcaagctggcattgaggcagaaaaagcaatgtttaagacaacgcataatataaatacccataaaggcgcgattttttcgttagggttgtttggctgtgcaagtagctattgtgaaaataataatcaaggtgaatttgaagtgatccagcagatgactaagggcttagtaaagcacgatttaggcaagaggaatgagactgctggagaaaaacaatttttgcaatatggtaaaggtggagttagagcagaagcagaagctggttatcctttggtgagggatgtagcactgccatttttagctcaaaccgaaggtgatttgaatgttcgtttactcgatacgttgatgaaaatagttagtgcgattgaagactcgaatttaataaaaagagcgggaaatattgaggttgtttcttgggcacataatcaagcaaaaaaatatttggcattaggtggctacggtactcaagctggtaaacagtttatgttagaactaaatcagatttttaaagagaaaaattatagccttggtggcagtgcagatttattgattattacaatttttatggcgttgcagcgtgggattatttaacgcaaaaattgtctagttaagaactagacagtttttttgctgtgtgtcgggcatggcatttgtttagtctagtgaaagtctagatcacgggtagttgtcgccaagtgtagcgaaccacaagccgttagcggtgacgctatgggtgaaggaagtggctagcgagttttccgagcctacgtacagaaacctggtcaggccaaatggtggatgagactgcagcacaagttaaagtccaaaggacaaccgtaaaaccaagacggtaaaccagggggcagtggaaaattaaagatgaatgtcttaccccgagagatctcgtggacaggtgaaaccgagtaagctttaatatcagcgatcgtaagcctggtcgaaaaaggttaatcgcgagaagtcagctgaggtcgtagtagtgctgaaggttttgtaatgaaactggagcgaagggcctaatgtttgtaagagcatatctcgctataagcaatgttcagacagtccggataagaggatagcctagcacaaagagaacgtaactctttgatggtgaaagcaattgggacaattctgaataaatttacaagtagaaatggagatatcacgagatggaactaattgaacagattttaagtcaaaataatctcaaggaagcaatcaggagagtcaaaatcaataagggagcgcctggtgtagacaggagaacagttgatgagcttgatagctattttaaaaagcatcaagtagaaataaaggacgccatcatgaagatgaagtatcgtccgcaagctgttcgcagagtctacattcctaaagctaatggtaagaaacgtcctttaggaatacccacggttgttgaccgagtaatccagcaggctattgcccaagtattaatgaagatctatgatcctcattttagtgagcatagctatggctttagacctggacgcagtgctcatgacgctattgaacaagtcttggaatatttaaacgaaggctatcaatgggttgttgacctggatattgagaaatactttgacacggtaaatcatgataaattaatttcaataattagagagcaagtaaatgacaaaaccaccctccatttaattcgagcctttcttaaagctggagtaatggaagatggttgggttaagcctaataaactaggtgtaccacaaggcggccctctttcaccaattctatccaatatctatttagataaaatggataaagaattggaacaaagaggcctgcgctttgtccgctatgccgatgactgcaatatctttgtcaaaagcggtaaatcagccaaacgtgtgatgaattcaatttcatcatggctagaaagaaagctattcctaaaggtcaacgcaaccaaaaccaaagttgtacgaccaaccaagagcaactttcttggctttaccttctggaaaagtggcgaatactggcaagcaaagccaggagatgaccgcaaaatcaagctttatgacaagatgagagaacttctctgtcgcagaaaagcagctgctcagcctctatcactagtctttactaagataaatcaagtagttagaggctgggtcaattactttagagttggcgacatgaaatattttctaattaagttcagtcaatggctgcgtcataaagtacgggtggtaatcattaaacaatggaaactaccaaaacgaatatacattaacttaatgcggattaacaaggcactaaagtgcaattttagtgatgaagatattcataaagtagctaatacgcgcttaggttggtataaaagaagtacgggtcatgtcattaactttctgcttagcccaaaagtattgggcataagcaaagcggatcgcccaggcttggtcgatccgctagaatattatttatctcgtaaataatcacaaacgtagcgccggatacggaaccgtacgtccggtgcaatgagaggggcgagttataaaactccctctactctattttagatttaaagagatttaaaatgaaaaatccttttaatccgacttttggagatataccacaaatttttttaaaagataattcggataatgaaactaaaaatgtagattcaattttctatttaggtttagataccgagtattgaaaaagcattaagctattgcagatagcttaatgctttttttactatttgattagatctcttataatccaaatgcaattttgtataataatgcaccacagattccacctgcaattggtgcaaccactggtacccaactgtaatcccagtgggctgaacctttgtgtggcaaaggacataaagcataaacaattcttggacctagatctctagctggattcaaagctggtccagttggcccaccaactgccataactaaagcagtaattaagaaaccaaccccgatgttagcaatgtcttcagattgcttgaagaacatgccacgatataaaccaactgcgatgaaaagcaaaatagcagtgccaaagaattcggtaataaaaccgttgaacttactgttagccgaatcaccagtcgcaaaactggcaaaaacagcatcatcactagtggttctgccaatgtaaggccagtagacggctactaagattagttgtcccacgatggcaccaagcatttgtaccaagatgtaaggcattacttgatcccatgggaagacgcctgaacaagcctgagctaaggtaacagcagggtttaagtggttccctgaaattgaacccaagagcatggctgggagcattactccaaacccaaaaccgaaggcgatcaagagccacccaccattggcttgaccgtcacggctattaccaccggtatcacgtagtacagaattggcaactgatccgttacctaaaacaactaaaataatcgtaccgaaaaattcggcaaaatacttcattaaccaagtatgttccataatagatactttcttctcctttagtagaaaaaataagtgaaaaatagtacaaccaaaaattatactcttaactcgaaaaatagatatagttttttgtaaaaaagcaagaaaatagcattaaaaaacactaacttttaaattaattaaaaagatttactatttggctgcaatcatcacaattttataattatccagcaactcaataaattagaccgttccaaatatgaacattatttaacaagccctagataatgccaaatctacttttgacaaataaatgcataatcattatattaatttcacaaatttggtatatagctttatatatacttaatatataactttaagcgctttcaaaatattgtggtactatacagttgttcacaattaatatgcataaaaggaaagagagtagcagttaatgagaacaatatatttggtgcgacatgggcaaactttgttcaatgtgcatcataaaatacaaggtacttgtgattctcctctgacggaattagggaaagcgcaggcgacagcggtgcggaagtattttttgcaaaaagaaattagttttgatgccgcattttgctcaaagcaggaaagggcaagcgatactttagaaattataactgataatcaattgtcttatacgcgactgcgtgacctgcatgaaaaatctcatggtgaatatgaaggacaagatgaattcatgttgccatggcgacgtggctttagccgtattaatgccgcaatggagccggatcaacatgttgaagaaagaatggaacgagcgatcactaaaatcattgattcaacccatgccaacgatacaattttgattgttggacatgggacggctttaaggttatttacgcagcgagtaaatccaacttttaaagaatatgataattgcgggatagtaaaaatgtctgctgttgataataacttgaaatatttaagttatgtagcacccgctaaagatgggttttgagactgtaaaatagtttgtgtaaggatgaatgattccttaaatttatttctttaaacattagaaaaaggagttcctttctcgtatgattggtttgaacaaaaaaaacacatacagaaagaagaactccttcatgaatgattttaccaaagattttgctcaagctctattcaatccagacaaaataaatgatttattgcgcaaagaactacaacaggctgttaataacttgctagaagctgaattgactgcctttctgggctatgatccctatgccagaaatggctggaatactggcaactctagaaatggtgcttatttccgcaaagttgatacgcaatttggcccaattgaagtgcaagtgcctcgggatcgcaacggtcaatttcatcagcacacgctgcctgactacaagcagcactcggatatcttggaaagcatgattatcaagctttactccaagggcgtgaccaccagggaaatagccgatctaattgaaaagatgtatggcagccattacagtccagctcaggtatcaaatatttccaagcagatgattccaaaggttgaggcttaccacaaacgcaagctaagcgacaagtttttctgcgtctatttggatgcgacataccttcctttgcgccgagaaacgtttgagcgtgaagcagtctatattgccattggcattaaacctaatggacataaggaagtcattgactactgcattgctcctagtgagaacattgaagtctggacagagatgcttcaaaacatgaagtccagaggcttgaagcaagttgaactctttctttctgatggtgttgttggcatgaaaacagccttggccaggacttatcctaaagctcattttcaacgctgtttggttcatgtcatgcgcaatatctgcgctaaagtacgcgtcgacgatcgtgaaaagatcatgaacgaattcaaacaggtgcatcaacagacaaacaaagaagaagccacagctgtcctgcatgacttctataccaaatggggcaaggtttacagccatgttatcagaagcttgaaagacatagaaccagatctgctggtcttttataactatcccaagcagatcagagcttcaatttattcgactaacatgattgaatcatttaacaatgtgatcaagcgcaaagctaagcctaaggcagagtttccaactgaacagtcgcttgatgcttttattggtattcaggcaatgagctacaatgaccgttatttcaatcgaattcataaaggctttggtcaggttcaggacaccttagaatcctactttgattaaataaataattaaaaaatcaatttacgagaaagaactatttacacaaaagatttgacagtttcgtggttttaaataaagcagctaaaaatgaaatgttagttgtgcgttaacgaaaagagaacaagcatgaatagagataattatattttgtggtttgatcaattgcatcgcgatgatgttgatttagtcggtggtaagtcatcctcattaggtgagttgacttctgaaacgaatgtcccggttccgtatggttttgcgactactgccatagcttatcgccactttatgaattattctgatttaaatcaaaaaattgataaattattggccactttaactgatccagaagattctgagcaattgcatcgaatttgcaccaaaattagaaaattaattatagaagcgccgatgccaaatgatttagccttagaaattagctgtgcttacgatagcttagcccaaaagatgcaccaaaatgagccattcgttgctgtacgttctagtgcaactgccgaagacctgcctgatgctagttttgctggcgaacaagatacttatttaaatattcatggtcgtgagaatgttttgaaaaaggtgcaagaatgttacgcttctcttttcaccgaccgggcaacttattaccgaattaaacaaaactttccacaagaaaaagttgctttatcagctgcgattcaaatgatggccttttctaaagcagctggtgtgatgtttacggtcaatgtagcaactggtgatgacactaaggttatgattgaggcctcttggggactaggcgaatacgtggtgtctggaactgttacacccgataactatgtagttgataaaaatacgatgaagattgtacacaaaatggtgactaaaaagccaattgagttgatcagattgccatcgggaggaacaattgaacaaaaggtagcaccagatcaagtgaataagcctgctttgactgatgcgcaaatcattgaattagctggttatgctaaagaaattgaaaaacattatggctgctacatggatatggagtggtcacttgatcaaaatgataagttgtggttagttcaagcacgcccagaaactgtttggtcacaaaagaaaaagcaggagaaaaccgatgcaccacaagaagcaactacagaacaccgagtattgttaaaaggcttgccagcttcacctggttttgtctcaggcaaggtacatattattgatgatccaaaagatatcaatgaatttaagcagggcgaggttttggtcactctaatgacgtcgcctgattgggtgccagcaatgaaaaaggcggccgcaattattaccaataatggtggaatgacctgtcatgctgcaattgtatcacgtgaaatgcagataccttgtttagttggaacaactagccgtggacaagctgctacgaaaactttgaaaaacggcgagactgtcaccgtcgatgctaaaaatggtgtggtttatgctggagttgttaaagacgcggttaaaaaagtcgatgaaaagccagctgagcctgctgcagttgaatatttcccaccaactgcaaccagagtcatgatgaacttaggagatcctgatcttgctgaaaaatatgcatctttgccagctgatgggattggtttaatgcgcgaagaatttttatggacgacttatattcaccagcatcccctttatttgattgaaactggtcatccagagagggtagttaacgagctagctaatggaatcggtaaagtcgcgcgggcaatggcaccacggccagtagttttacgtttttcagactttaagtctggcgaatatcgcaacttaaagggcggcgacaaatatgagccgcatgaaccagcagacctattaggctggcgcggtgcttctagatattatgatccaaaatatattaatgcttttaaattggaacttgaagcggtaaaaaaggtgcgcgatgagttcggattaaagaatttacatgtgatgattccattttgccgaacagtggatgaagcgcgcaaagtgacggaaatcatgcggacacaaggtttagttagaagcgcagacttcaaggtttacatgatggctgaaattccagctaatattattttggcggaccagttcaatcaatttattgatggttattcaattggttcaaatgacctaacgatgcttttactggggtgcgatcggaataatgatgtgattgctgatctttttgatgaaagaaatcttgccgtcaaaagggcgattaggcacttgataaaggttgctcatcaagatggtaagacggtttcgatttgtggtcaagcaccatcagaatatccagaatttactgaatttctagtcagaagtggcattgattttgtatcagttaaccctgacatggtgaaggcgactaagctaaatgtagctcattatgagcagaggatcctccttgatcatacaactggcttaggtaaaaaggatccaaatgaatataattggtaaaatacgcgtggtgctagttaaatcgttttagttaataaaaaagtccaatcttgttagactcgacttgtaaatagtaataatagaaaagagtctgatctgattgaactgccttaagcttaagcgttttagccaccatttacaagttagttttaaagatttagtgataatttgtcggcactggtatcgtttgtatgcaccggctgagtttactcatcggcgaaatattgatcaaattaaaactacggacagtctgattttggctttacttatctggcaagctaagacaggaattgaatcacaaagaagattctgtgaatgtttcaattgtttatcacactcacgttttaatcggcgttcacgtcagctattgcaattgatttatcagatacggcaagaaatgaataaaaaggttgacctgaatggacagttcttgatcattgacagctttccggtacctgtttgccaaccaattcgaaactatcgtgctaaaatttttcgcggttatgccaacattggttataaggccaccaagaaaatttacttctatggtttcaaagttcatgccattgttagcgatgacggttacattcttgattatgtcgtaacaaaggcatcagttcatgatgccagggagacagttgaactgatagaaaatacccatccatctaattactatcttcttggcgacgaaggctatttaggcaaagaactgcatcaacagctaaaacaaatgggttacgaactttggacaccatatcgtaaaaatatgacaggagctaaaaagcacaatgatcatcaattgatggctattcgcagaacaattgaaagcgacttttcgcttctgacctattacaatgccgagaacaatcgagcacgtagtctgataggctttcaaagccggttggaaattgcaattttagcttataatttggcttattgtctagaacgatttaactagcaccacgcgtggtaaaatttataatttgatgaaaagtctttgattgcagtattgcagtcaaaggcttttttagagttcaattttgtttttgggcaattttacatttaatttagtaaaagagtaaggttgaactaatgaaatttcgtaagcatctaaggctaatctctcactggcaaaatcagggttatataaaggatcgcctacaataggacttcctaaagaggcaaggtgaacgcgaatctggtgtgtacgaccagtttcaagcgtcaatttgacaatcgcagtattgtcatcatttttttgtaaaacttgataatgagtaactgctcttaatccagtaggatcgattttgcgtttgcgttgatcaagtggatcgtgaccaattggggcattaatcgtacctctttcagctaagtgatcagcattgataactttagctaaataatcgcgatgaaaaattttgctggttaattcacgatttaaaataggtacaactgcaggatttttagcaattaaaagtaaaccaccagttaacatatctaatcgatgaacaatatagggactctgaccaagataagtagtacaatcgttcagagcagtattagtttcatttagattagggtgcgttttttgcccttttttcttattaataattaaaagattatcatcttcatagataacatcgggcatcttaccgcttggtgcataagcctgttgatcactttcaacatgatccaagttaatttcaattttatcaccaggtaaaatgttttgattaaaatagcgatagttgccgttaactaaaatattttgttcaattcgcaaaaaatgacgccacttgcgagggattaaaagttgacgtagtacttcattgacagatgccggagcaagattttctgggtaaaaaagtgtaaaacggaaactcataataatttcttaagtctaatctagttataaacacgtgttttgatagtatggtacaattttcttgtttctaaaaaggagcaatatttaatgaataacgaccaaccaagaagaggtggctttaaagatgcttggcatcgatttgatagtcgcttctttatcggacgctggattattttaatcctgctcacattgatgctcttaacttgtacctattatacaattaaagttaagacatcaaacatagctaatttgaaggcttcgctttcaaccacaactacaatctatgactacaagggtaaaaaagcaggttctttatactcgcaaaagggatcatttgtggaatatgaccagatttcgcctaatattcaaaatgccgtaatttcgactgaagatcggactttttggaagaacccaggttttagtattaaaggcatggcgcgagctactttaagtttagtgattcatcacggtcaagtaactggtggtggttcgaccttaactcagcagttagccaagaactcgcttttgacccagcagcagactttttcaagaaaattggaagaactcttttttgcaattgaaattaaccatgtttactccaaaaaagatattttaacgatgtacttgaataatgcttactttggtaacggagtttggggcgtgcaagatgcaagtcgtcgctattttggcaaaaacgcaagtgaacttaatccgagtgaagccgcaactttagctggaattttacgaaatcctagtttttataatccggttgatcacatgtcaaatgctttagcaagacgaaatttaatcttaaacttgatggtggataataataagttgacagcggctcaagctaaaatgtatcaaaagcaaggattaactttgcggaatacttttcaaaataaaaacggctatcgctatccttacttctttgatgctgtagttgacgaggcaatctctaaatatggcttaactgaagaacaagtcatgaataaggggcttaaaatttatactactttaaatcaaaattatcagggtaaattgcaggatacttttgagcaaagctggcttttcccacaaaatggtagtgatggaactgaaagccaaggcgctagcgtggcaatggacccaagtactggtgctgttcgggcaatcatcggtggtcgcggtaagcacgtcttccggggttacaatcgtgcaacgcagatgaagcggcagccagggtcatcaatcaagccgttggcagtatatgccccagctttacaaaatggctatcactatgactcgcaactatcgaacaagttgcagaaatttggtaaaaatggctatgaaccgcataatgtggacaatggctattctaatacaattccaatgtatgaagctttagaacaaagtaaaaatgtgccagctgtttggctattggataagattggtgtaagtaaaggcgtgcaatctgttgaaaactttggaattaaggtaccaaagagtgaccgtaatttagcgcttgccttaggtggattatcttcaggcgtttcgccaattcagatggcacgtgcatattcagcttttgccaacaaaggtaatttgcctaataattctttctttattaccaaaattactgatgcttcgggtaacgttttagccgaaaataataatccaagcagccaccgcgttatttctgaaaatactgctaaagaaatgacgactatgatgctcggcgttttcactaatggtacaggacgctctgctcagccaaatggcttccgtgtagctgggaagactgggtcaactgaagtacctaactcatatggatttggtaccaaggaccagtggatcgtcggttatacgcctgacattgtacttgctacctgggttggttttgaccacactaacaagcaacactacatgcagggcatttctgaaacaggaattacgcgtttatataaggctgagatggaaggaattttgccgtacaccgcgcaaactgaattcacggagaaggcacctaaccagattgtgaagaataatggttctaatgatgactggactaatggattaggtgaaaaaattcaagatggactcggttctgcaggacagaaaatcaatgaatggtataatagccttaaaggcttatttggccaataaaatttaggaggactagatggttaacatttacgatgctgctaacaagttagcagaagatttgactcaaactgatcaatacaagaagttgcaagaagcaattaaagctgttgaagatgataaggatgcttcagctttattcaaaaagatggatgaattgcaaaataagatcatgcaagcacaacaagctggtcaaccactttcagctgaagatcaacaagcttacaaggacttaaatgatcaagttcaaaagaatgataaaattgtttcacttcttacgaatgaacaggggttgtacgatttgcttggtgaagtacaaaaagcttacactaagccaattaatgatctttatgaagatcttagaaattaatattcgcgatgaaatttattcactttgcggatgcgcacttagatagtccatttcgtgggctatcttttttgccatctgaggaatttaaccatatctatcaagcagctgatcaatcattaactaaaattgttgatctggccttgcaagaaaatgtcgatttagttttaattgctggtgatacttttgatagtaatacgccatcaccacgagctcagctattttttgccaagcaaattaagcgattaactgaccaaaaaattcaggtagtgatgatttttggtaatcatgaccacatgaagcaagaagatctgctagttagtcccagtccttactttaaattgttaggcaataatgaaacagtagagcaagctacttttactacggatgcgggttttaactatgacgtaatcggcttttcatatctgaataaccatatcactgaggataaaatcccagaattcccagcaaaaggaaaaaattatacttttggtttaatgcatgctcaagagaaatcagctactgctagtcagaatgtgtatgcaccgtttacagttgatgagttgcaaaacttgaattatgactattttgctttgggtcatattcatgcgagaaataatttaagtagtacgccgtggattgtttatccaggtaacattcaaggtcgccacattaatgagatgggagccaagggatgctatctaggtgagattgatgaaaatagtggtaagactactattgattttaaagaaacagggccaattttatggcaagggacaaaaattaatcttgaaggagctatcagtaaagctgacttacaagcgaaaattattgccaagcttgaatctggacaaaaaacgtactttagtttgacgattgctggtgctcaatatttgagtgccgaagaacgcgatttagttcaggatcttgatttttggcaaactatttctcaatcgctgccatttgcttctcagttagttgatgtgcgctttgttgtgaatactagtttaaagttaaatgacaatgaccaacaagccttccaagctgccaaagaagagttatttgcaccagctgaattcaagcaaattgttagtgactggcaaaaaaaggatccagaagctgctaaattagcggctgatccagactttattgcggcggttaagaatctaacagaagtaaaactaatgagtaaattgaaaggaattaaggatgagactgaaacaaattaagattattaactttgggcagttctcgaataaaaccttcgatttgcctagtgatcaaattaatgttttctttggtgccaatgaagctggtaaaagtacaacggtagcttttattaaacagatcttatttggctttcatttgagaagtaactcttcaccgttttttgaagattatacgccgctagctcatgttagtccgatgggcggtaatttagtttttactgcagctgatggtgaatacgaacttgagcgactctatgctaaaggtgacaagactaaaaagggaattttaaccgtcaaaaaagatggtcaagttgtacctgagagtgtattttttgatcaaattcaaaatattgatggctctttttacgctgatagttttatttttaaccaagaaatgctgggtcaggttaacagtttaagtcaagaggatttgcttgagcgaatttattacttgggagcagcagattctagcaagttgctggaaatgcgcgacgattttgccaaagaaacgggtaagctttttaaaaagacaggtaaaaagcccgaagtaaaccgtctgcttaaggaaatgactgatcaacgtgataaattagcgcagactaaaaatgagtttaatgattatgaacagctgcaccaagattttgtacaaaaaagagcggcattaaacagacaaaaacaagatctggctgttttacaaaaacaagaacaagatttgcatgatttgcaaaaagaaatgggcaattatcagacgctgcttgatttgcaaaaacaggtcaaggatgtcgactttaatggtcaaaattatcaaaaagcccaagatattatggctcagggacgtaatttgcaaaagacgattcaatcggtagaagcgcagttgcagggcctgggtgaaaacgatcagtctgattttacgctagagaagaagctaatccagcagaagcctcaactcttgcagtggcaagcggaatatcgtaattgtttgcaaaaggctgaccaattgaagcaggagaaagagcaactattagctttgacacctgagttaaaaaatctactcaagttgacaccagagcaaattgaacaaatgcaggcagactatcaagctttgccaggtgctgtcaatgagcctgcttatgtaactactaatgacaagctttggtatgttatcggtgcagtgttagcggcattaggtgtagttcttttggtagcgttgggtacagttggtgtaattgcattaattactggactaattttcctagcagcaggatacttaaaaaatagtaaccaaaataagcaaaatgcggcagtattagaaaagcaaaagctggttgctcaaaaacgccaagctttccaaacaaaatatggattgaatcctgatacgctaaacttaaatagcttactaactaatctgaaccaatatcaaatcaaaaagaatgccgcacagactaataataagcaagtaactgttttgaatcagaatgtggctcaactggcctcaagtgtccaaaatgcattgaagcaaccgattgataatgactttagtcaagttttgaacggtttggacgaacttgagacacaaattagtgaaaaacaagaattgcttcaaagaaaatccagcttaactgcatcactaaagcaggacaagcaagatttgaaagaattgggtctgaaattacaggcactttttgcccaagctaatgtggaaaatatggcaggttacgatcagctttatcaagattcacttaatcaggctaaactgaagacgcagattgcggccttgaaggaatcgttaggcgatgatcttcaacagctgcaaatgcagacaaattcaaccgaattagcagataaattaacggctttgactgaacaaattagtactaagaatgcagaaattaatgaacttcagagtcaagttgctcagttgcaagtgcagttagacaatttagctgattctactgcggtgtttaaggctaagcaggatctggctaatacagaaaccaattttgtccagagcagtaaagaatacttggctaacttgtttgcggcaaggtggatcagtcgctcgcttgacttggcatctaatgaacggttccccaagatgcttaaggcggctcaggaatacttagctttgctaacgggcggcagatatgttgggattaatttagataagaagctaacagtagtcagaagtgatggtaaaaagcgcgaagtaaaatacttgtcacgggggactgctgagcaattatactttgccttgaagttagcttttattgagcagatcaaggatgaaattaatttgccaatcttgattgatgattcgtttgtaaactttgatgatcagcgagtcagctatatcgatcagttattgcaaaagattagcgaaaacaatcaagttttaattttcacagctcaaaagaatttagttgatcagcttgggattgagccattaacttttacgaaaggaacacaggatgcttaagagattgttagattacaacgatggagaagaaatggacattgttgttttgattagaaactcacagttgcgtcataataaaaagaataagttgtttttagcgatgcaattcagtgatggctcaggcgagattcgcggtaattactgggatgctaacaatcaagatgcagcaactttttcaactgggacaatcgttgagttgaatggcaaaagagaagaatatcagggtcgccctcagattaggatctattctctgcgcgtggtcggtccacaagaaggctatgaattagatcaatttattaaatcagcgccggaaccagttaatgagatggaagctgaaattaataaatttgtgatgcagattgataatccgacctggacaaaaattgtgaagtatttacttcaaaaatggcatgatcgtttttatgatcatcctgctggtaaaagcaaccaccatgcggtccgcggaggtttagcttttcatactttatcgatgcttaaggatgccaaaggtttggctgataattatgagcaagtgaatagatcgctactttatgcgggatgtattttgcatgatatgggaaaagtactggaactttcaggttctgccgcaactcaatacacgactgaaggaaatttggttgggcatctggttttaattgatgaacaaattatgctggccgctcaggatatgaagatgaatctggagtcggaagatttactcttattgcggcatatggtgcttagtcaccatggccgctttgaatatggttcacccaaattgccggcattgctagaagcggaattattgcaccgaattgatgatttagatgctgcaatttatgcagtaacgaatgccctgcagcatacgcctaaaggcgagttcaccgagccactactgagtcaagatggcaagcgatattatcgaccgatgcacgattcagcgctagataacgcaaaacatttagaataagaaataagcatcactgcagttgatttgcagggatgcttattttgttgaaaaattgaactagagttttattataatttcatagtataataaatctaatttataggggagtaaaaaggatggatattgctgaaattactaaaatgattgaggcggttaaacaaataatagaaaagaatgattacattgatttgccgctatttcagaattctagtcaattaaggttaaaaggaaataattataattttatacttgatttgaatagaaaaggacatagacgtcctaaatgtacttttctattaagggaaaagagaaataaggaacagccattagttagagtagatattattggacgtcctcatcaaaatcctgttggagactttaaatggtcaaataaagtcattccttgtcctcatttgcatagagcggattttccaaaatatggtacatatgtagctgtaccacttttggaaaagaatgaaaattttcaattgagtcagaatgatttaaataacttgtgtgaatgcttgaagaagacattaaagtttttgaatgttgataatataaattcatataattttcgagaacaggaaagtttattttaaagaaaggggggagaacagttaaatatgtttgatgtagagaaaatgaagaaaatatattttgactggatagataaaaagattcaatttgtcccttctaaaaatcaggattatatgactatcactacaccttttttagatatgtacaatgattatatagaattagtgattgcacaaggaaatacatcaaaatatataattagtgatgatgggtatactattaatgagttagggttattagatattaatttaaacagaaaatctaaacgtagggactactttcaatcgattttgattaattttggtgtgaaaaatcagaataatgaattagtaattgaatttgatgacttagcccaatttccagatgcacaaaataggttaactcaatgtatgttgcaagcttttgatttattacagacttctaaaaatagtgttattaagtattttaaagagactgtaaaatagtttgtgtaaggatgaatgattccttaaatttatttctttaaacattagaaaaaggagttcctttctcgtatgattggtttgaacaaaaaaacacatacagaaagaagaactccttcatgaatgattttaccaaagattttgctcaagctctattcaatccagacaaaataaatgatttattgcgcaaagagctacaacaggctgttaataacttgttagaagctgaattgactgcctttctgggctatgatccctatgccagaaatggctggaatactggcaactctagaaatggtgcttatttccgcaaagttgatacgcaatttggcccaattgaagtgcaagtgcctcgggatcgcaacggtcaatttcatcagcacacgctgcctgactacaagcagcactctgatgttttggaaagcacgattatcaagctatactccaaaggcgtaactaccagagaaatcgctgacttgattgagaaaatgtatggcagtcattatagtccagctcaagtatcaaatatttccaagcagatgctccccaagattgaggcttatcacaagcgcaagctaagcgacaagtttttctgtgtctatttggatgcgacataccttcctttgcgccgagaaacgtttgagcgtgaagcagtatatattgccattggcattaaacctaatggacataaggaagtcattgactactgcattgctcctagtgagaacattgaagtttggacagagatgcttcaaaacatgaagtccagaggcttgaagcaagttgagctttttctttctgatggtgttgttggcatgaaaacagccttggccaggacttatcctaaagctcattttcaacgctgcctggttcatgtcatgcgcaatatctgcgctaaagtacgcgtcgacgatcgtgaaaagatcatgaacgaattcaagcagatacatcaacagacaagcaaaaaagaagctgcagctgtcttgcacaaattctatgccaaatggaataaagcttatagccatgtcatcaaaggtttgaaggaaattgagcccgatctgctagtcttctacaattatcccaaacaaatcagagcttcaatttattcaaccaatatgattgaatcctttaacaacgtcatcaagcgtaaagctaagcctaaggcagaatttccaactgaacagtcgcttgatgcatttattggcatccaggcaatgagctacaatgaccgttatttcaatcgaattcataaaggctttggtcaggttcaggacaccttagaatcctactttgattaaataaataattaaaaaatcaatttacgagaaagaactatttacacaaaagatttgacagtttcattttaaagaagatgtaacaaattattttattgataataatattccagtaggagaagatttgagtttactaggaaaaagcggacggaattctaagtttgatattgtggttggacgtacaagaaaaaaaccgcaacaagctattaaggtggtgaatacgcctattaattctaatatagctaaccctttatttagaattattgatgtacgagaaagccaacctaaaacagaattttcagttattgcgaacaatattaatagtcctgtttctagtgattttaagtctgcctttaagaactataatattcctgtttattcttggtcagaaagagagcaatggctttccaaatttaaattggcaatgtgatagttgattaaaggtgttgagctgaaattgtaaataatattagttctagcattaggcaatatggaacatttagaataagaaataagcatcactgcggttgatttgcagggatgcttattttgttttggtgaaaaattgtgtcaataattttttgaacaaagttattgacaaattagctgaagaataataacatgtttatacaattgaaaagcagagatgtttttggatagattagagacttgtctcctttctatttttttattgataaaaagttcaagaggtatacattgatttcctcttggacttttttgatgcattgaattgctaaagatgttataaaaattagggtagggaataaaaatgaaagcatcaaaaaaattaattttagtatcggcagctacgataatgttgactgtacctgttttagcaaataatcatttgtctaatccagttgttgccgcaagtcaagataatacacaaactactaaattaacgttctatattaaccacaatgcctatgtttacaatcatcaaggtaagcgtaccaagagcaagattaagaagggaaagttactaaaggtgactatattgaagcctaaggcaattactaacccaaatcaaagcaggtatttcttcaataatgtattagctggcaagtatttttcgttaccgacagtaagcatcaagaagacagactttgttaatattggcaaaaataaatatattaagccaggcaacattggtagaatctcgccaggaaaatatcaatatgcggatctgtcaactaaggaaattaaggtaattaccaaaaagactgctccagtaactaatcaaatagggatgccaattgctgctccaattaagaagggaactaagcttacagttgatcagaactattatcataatgttgacggcgctgatgattatttgagtagtctggaatattatcggattaaaggtactgataagtgggtcaacctacctgctatcaaaaagtcaactcggattatgccaaataattttgcattagctgcatctactgaagataattatgtcattgccggtaactcaacgtatctctataatattgacggtgaaatcgttgataagagttatttattgattccagatgttaatgttggcgttgatcgagctctttatatttggaacaagcaaactaaacaagctgatctatattatcatcttacggctaacaaaaaattggtctgggttccagctcttgatggaacaggcaagactggtactacgattaccagcaacggctcatatgctcaccaaactaaagatacagcaaatacttttgttaaagctagtgatgtgacaagtcaaaatccagttgcattaaaagttgataatacaccgagcgaagcacaagcagatgcaagtcaggccactgctagtgactatggtgagttgcaagccttagttgatcgagcaggtcaaattaaaaaatcgactttatatcgtttgactgaaaaagcacagcaagaaagatatgatttggccgttgataacgcacaaaagttattgactaacaagaatacttctattgcggcagttaagcaggctagttggcaaattaaatacgatcaaagtaaattagacggacaaaaagtttgggttaaaaacatgaataaactaactaaggcagaaaagtcttgggtagtttcattggctaattgtgatatccatggtgatttacaaaaagaatatgctggcttttataaaggtaaaattgcggtagtgacttataataaaaagactttcaagagtgaacttgtacgctacttgaagttgtctgattatgctactgataaataaaattaaagagctcaagaatgctttaatgatgaagcatcttgagccttttgatttgtagtaaaaaaatatccaagaccgaaatcttggatactcattggagctggaactgtgcttgatgaggcaactgctagaatggcgattgtttcaggagctagattcgttgttagcccatcttttaacgaaaatactgctaaggaatgcaatctgtatgcggttccttacatgcccggttgctttagtccaacggaaattcaatctgctttaacttatggtgctgacgtagtcaaaatcttcccaggttcaattgctggtaaaggcattatttctgaaattcatggacctttcccatatgttaatgtaatgccaagtggtggtgtatcattaggaaatatgcatgaatggtttgctagtggtgcctatgttgttggtgtaggtggcggattagttggacctgctaaaaatgatgattataaagctgtattgcataatgctcaagcttttcataatgaatttcaaagtattatttatgccaactcagctgctactaggaaggtgccagtgagggcatagtttttttactgggggggaatatgatgcccctattaaaaaaataaattaatgaaataaaaaaacgtcgaatccattcagattcggcgtttttgattaactaaatatatttgttacttagtagttgaaacgtatgatgataatacatccttcaagtcgctatccttgattgaaacgtcagccttcttcaaaacagtagcaataacgtctttcatagtagcttggtcttgagccattgatgcgtaaatttggtcatcgatagccttcttgtgatcagcaaacttacccttagctgggtggctgatcatcttgattacgtggtaaccagattgtgacttaactggagttgaagtaacttcaccagtcttaagcttgaatgctgcagtcttgaatgagctgtctaaagtagtgtcagttgagtcgaatgatggcaacttaccagccttgttcttagtagcagtatcaagtgagtacttcttagctaaaaccttgaagctcttgccatctttcaattgcttgatgatgctttgagcagttgacttcttagcaaccaagatgtgttgaacagttaccttaggttggtagctcttccaagcttgttgttcttgcttcttagtaactttcttaatgtgcttcaatgcttgttcagaaagaaggttagtcttaatgttttgcttgaagcttgaagcagtcataccgttttgttgtaaaacagcactaaattgtgagccgtattgcttcttgtagttgttgtattgcttgtcgactttcttttgagatacgtacttgccgtattgttgttccaaagcgcggttgataatcatattagccaaagttgacttaccggcttgtgacttcttcatttcatcgtagtattgttgttgagtaatcttaccgcccttgtaggaagcaacagtagccttagtgccgctattagaacaagcagcagttgataatgcaacgccagctacagctacgactgcagcaatttttttcatataactcttcataaaaataatatctccacatccttaaataagtaactgttcattaatataccataaaaaagggcgtttcgttttcaaattacgaattttcacagaaaaatcaaattttctttattttttcttagttctttgtgtcttgtgagttagtatctggcacgatgttttccaaatcttggttcaatttatcgctctttttttctatgcggttaacgataggttgaatatggtcggaataatgttcaacactatcattaatatcactaattgtacgttcagctgttggcatttgttcatttaattcttgactagcctttttagctttttgcaaggcagaattaaagcgttggctttcatgtttaattgcttcgaactcatcttttaatggcttgcctgggcgattaccattgctatctttcatacaggaaaaaactagcccagctgttgcaccaaaaactgtgcctaataagaaatgtttcatttttaacctctaaaattgtgccttaattttgttagcaacttcgttgtatttagcttcatcgtatttgtcagcgttgttgcgggtcatcagcttcaagccatcgccttcaaaacgaggaatgaagtgaatgtgtgagtgcataactacttgatttgcggccttaccattattagtagtaatgttcattgcagtaacattagggaaggctgccttaattgcattagcaatttcaggaatatattgtaaatagcgttgtgcgtcttccttggtgtagtcaaacaagttaacgatgtgcttttttggcaccattaaggtgtggcctgggttaacttgagaaatatctaagaaggccttaacatcgtcattttcaaaaacggtatagctaggaatttcaccgcggataattttgcagaataaacaatctttgtctaaattttccataataaaacctcatatccttgtactttagtttactattaaatccatgctatcataataaaggtataaattcagtaaagaaagataggaaaaatgacattaaaaattgaacatttaacgggaggctacacgggtgtcccggttattaaagatattaatttggaaattaagccgggtgaggcactaggcttgattgggctaaacggcgcggggaagtcaactacgattaaacatattttgggtttacttcgcccgcaaaagggtaagatcagcttgaacgatgttgtattgacgcagcaaccaactaagtttaagcgtgaagtagcttatattccagaaacaccgattttgtatccggaattgactttaaaggaacatttggagctaaccatgttgagttaccacttggatgaaaataaagcatggaaacgcgcacatgagctgcttaagatgttcagacttgatgacaagctagaatggctgccgattcacttctctaaggggatgcggcaaaaagtaatgattgtctctgcctttttagcagatactagtttgcttgtaattgatgaaccatttactggccttgatcctttggcagttgctaacttaatcgatttaataaaaaaagcaattgctgacaaaaagatggtcttaatgactactcacgttttagctgatgcacagcaagcgatttcgaattatgctgtgttaaaccgcggcacgatcgaagttgtggggagtttgcaagaaattcgtcagcactatggccttaagccagatgatccttttgacaagttataccttgctttgaatagagaggataatggcaatgcgtgagttagcgaatagaaggttgagcgagaatcttaaacaatcagtaaaatatttgacgctggtgtttaatgacttctttattttagcgttgatctttttgtttggggcgctgatgttctggtatgcccaagctatgcgcgtaattcccaataatctgtggttctataagccacttgtcggctttatcatgtggttgccattattagctggtcgattagttaccttattaaaagaggccgacatgcaatttctgtttacgcaagatgaacaaatgggtgaatatctgaagccgatgattcgttacagtatggtgctgccaacaattctgattgttttgcttggcggaattctgtttccgtttgcgacggtaaaggctggaatcccagtttggtcatatgtaatcctgattatcagcactgttttattaaaattgtgtatgttgctgattgaaaaagagagtttgtacttctactacaattatccgcaatggatattattagtggtaactctggcggctttgttgattggctcactaggatcatttatttatccaattgaagttgtagtattaatggtaattacgcattttggtactaaaaaagaaaagggcgtctttaactggcgctatgcgattaaaactgaacaagctagaaaagatcgcgtttattcaatcttcagtatgtttaccgatgtggcagaaaagcaagttacaatcaaacgcagaagatacctcgactttcttttaccaaaatcattggctaaggaaaatcctaatttgttcttgtatcggagatcacttttgcgtaatccagaatacttgaacttattagtcagaatgactgtctttgcaatcttggtatcgtggttagtgcaagattggcgttgggcactaggcctttcatgcttggtaatctttttaacggtctatcaattattgccaatggcaacagagtttgaccgcaacttcatgtaccgcgtttacccaattgaacggcaaaatcgtggcagggacttggtagaggtgttgacaatgggcttgtttattcaatggctcttgattagtgtctgctggttaattgtgctaccaattaatgttaacttgtttgaagcgatggcaattttacttggtttcactatgattgtaactgccacttacttgccaggcagagttaaaaaaatgaatcaaaaaaattttggaattagataggaatagagaatgagattaagaaataaaccttgggctgttaagcttgtaaacgaccatccagaaagtgttttgcaaaatcctgatcctgaaaaaaagatcgactggactgaacgatttggtaatgatcatcccatcgaaattgaagtaggttctggtaaggggcatttcattactacgttagctgaacaaaatcctgataaaaattatgttgcattagaattgcaaactacggctgcggggattatcttgcgaacaaagttggaaaagggcttggataatttacaaatcttacgcggggatgcggctgacatcaactgcttctttccagcaaatagcaccaatgttatctacttgaattttagcgatccatggccaaagactcgtcatgaaaagcgtcgtttgacttacaagagttttttgagcaagtatgaacaagttctgaagccagaaggacatattgaatttaaaaccgacaatgcgggcttgtatgcttactctgttcagagcttgaataattatggaatgaagtttgattttgtttcagttgatcttcatcatgaaaagccagagattgtggaaaagaatattgaaacagaatacgagcataaatttgcagctaagggtaatccaatttatgctttgcacgctcattttgaggatgaatagtttgaagcgtctagagttacagcagataaactctaggcgttttttaatgctttattggataaaatcttgctactagctcatcgctttagttattttgttttagaatagaactgtaagatttcagattattggagggaaaattatggaagataaaccttattatgaacaagaatatcacgaacctaaaactgatattcctagaccaacttttggacaagcattcaaacttttgtttactgcaccatttaagtagaatgcacgtagtactcgtcgtggattttggtatgcctatgtttgggcaattattttgctagtcattttagcagcatgttcagctacggcatattcaattgatggcattgcttattcaagtaatgaattcttcttattaacgcacgtttcaactggtacacttattattcaaataattatctatctactgattatttggatcttattaggcttacttggctttaccataagaagattgcatgatactgaccacaccggttggtggtactggatctcggttattccatttgggtatttgtttttactttacttcatggttttgccaactgttgaaaaaccagttcgttggggcagttatctatttaaagaaaagaaataattgtaagactcaatttctagctttttagttaaagaatggttataataatatcaacttataaaaagtaagaaatacatgaggtatgaaaaatggaaaagattaaagaattaactgaagatcaattaaaggaaattactaaagaaggacgtactgtgcttgaattctcagctgattggtgcccagactgcaagtttcttgctccatttatgcctgaaattgaaaaagatttttctgatgcaaaattctacgaaattgaccgcgacggttcaattgacatagcaaaaaaattaatgattatgggaattccttcatttgttgtctaccaagatggcaaagaaattggtagactagtaaataaggaccgtaaaactaaagatgaagtggaaaactttttacgatcacttgactaatagaggagaaaaaaaagcatgattactagtactaataaagaagcttatcctaacactttgatcgttatcttaggtcacgatgaaggccgtagctcatttgaggaaaaagaagacgttactcgcgtaactaacgatgaaggcaagaccattggttacaacttcttcaacgttgataagttagttgactttgataagttaccaaatggtccagttaagttgtcagacgatgagcttgttgcactgaacaagaagcttgatgaagttggttttactgacaagttagcatatggcaagccaactttagtttatggctacgttaagacttgtgaaccacaccctgattcagatcacttgcacgtaactactgttgaggttgctgatggtgaagaacaccaaatcgtttgtggtgcaccaaatatcgctcaaggtcaaaaagtagttgttgcacttccaggtactttaatgccaaatggtgcacaaatttggccaggtgaattgcgcggtgttgattcatacggcatgatttgttcagctcgtgaattaggtttgccacacgcaccacaaaagcgcgggatcatggttgttcctgatagcttcgaagttggtgcagaatttgaaccaactaagtgtgatgaattgattgctagtggtgaaattactttataatttgaataaagcaaaaataaaaagttaaccagttggtgcaaaaaagctaattgatcaacttttttattttgtctaagaaaagccaccagtttcaccttttaaggagctagtgaaccaattttgtgggaaatagttttacccgtaaggtctttaatgatcaaatgatcgacagtattaacataattgtcgttttcatcatagatttcttttgattttaaaaattttagcataagaaaaatggtaaaataattaacgaataaaaacgttgaaatttcgagggacaaataatgttagataaaaataagcaaatttggtttattggaatcaagggtactggaatggcatccctggcactgcttttacatgacttaggctataatgttgccggcagtgacatcgagaaatacactttcacccaagttccacttaaaaaggttggaattgaagttaagaattttgatccagctaatatcaagagcaatgctgagcaagtaattgttaaaggaaatgccttcaaggaagataacccagaagttaaggcttgcttagacaaagatgttaagtggcagtcttacccagatactgttgaagaagttgttcaaagtcatacttcaatcggtgtttctggtacgcacggcaagacttcaactactagtttgctagcccatgtgctcggtgaagtcgctccgacctcatacttaatcggtgatggtcgtggtaaaggcgttgctggttcacgtttctttgtatatgaagccgatgaatatcgtcgtcactttttggcatatcatccagattaccaaatcatgactaacatcgactttgaccacccagactacttcaaggatcaagccgattacaccagcgcttttcaatcagctgctgatcaaactaagaaggccttgttcgtctggggtgatgacaagcgtttgcaaagtttgaagaccgatattcctaagtacacttatggctttaatgatactgatgactttcaagctactcaaattgagaagtcgactactggttctaagttccacgttttggctcacggtaaggacttgggcgaattcgagattcacctctttggtgaccactcaattttgaacgccactgctgttgtggccgttgcttacaccgaaaaggtgccaatggaagacatcaagaagggcttgccatcattcaagggtgctaagcgtagatttagtgaaaaggacttcggcgacattgccgtcatcgacgactatgcacaccacccaactgaaatgcgcgccactatccaagctgctcgccaaaagttcccagacaagaagttggttgttgtgttccaaccacacactttctcaagaactaagaagtatcaaaaagacttcgaagaaatcttgcgtgacgttgataaagcttacgtaactccaatctatgcttcagctcgtgaagctaacggtgatatttcaagtgaagacttggttaagaatattcctggctcagaagtaattgacttagacaatattgctgacttgactaagaataagaattcagtcattgtctttatgggtgcaggtgatattcctaagtatgaagatgcttttgaaaaattgctttaattgaaagataagcatgaaaaaaactgttctcaataagagagcagtttttattttggctaatctttgattttatccttgagatccaggctcttttcataaataaagtaaccgatgatgcaggtgatgatatcactggctgcttgagcccaaacgataccgtggtagccaaatgtgacttttagaatttctaatgcgataaagtagacaacgccttggcgaacgatggccatgataaacgctgcccatgcattaccaactgattggaagacggtagtgtaaactaaaatgataccaacgattgttgtggtaataatagtggcaattaacatataattaccagcgttaacgatatctggttgattcataaatagagcggtgactggacgagcaaataaaattaataatccgcctgaaattacagcataaacaacttgcacaagaatatcgaagtttagaattttctttaatcgtttccagtttttagcaccatagttgtaaccaattaaaggttgtgaaccaaaggcaaaaccaacgattaccaagataacgatactgtaaatcttttgggtgattcccattgcggcaactttgtttgcaccgtatagagctaaagatgagttaagaagtgccatgccagagctttgagcgaagttggtgattgaaccggggatgccgattgctacgatatctttgattgttttgccgctaattttgctatattttagctttaatttgatgtagtcagttttgtataaaacgtagtaaatgagaatagcatcagtgactagataacctgtaacgttggcaatcccaacaccgattgcacctattttgaaaacaaacaagaaaataggatcaaggatgatagctaaaatggttcccgtcattgtagcaaccattgcttgggtagctaaaccttctgttctgattaagttctgcggaatgattgagaagataattggcgcagcaccaattgatattacacgataaaaatcggcagcatcttgataggtggcagcttttgctcctaaaagatgaaggatcggattttctaaaattagtaaaatggctgttagtattaaaccagtaacaaatccaccgatcatacaaaaactgcttacacgtttacttaattgataatttctttcaccgaatagccgtgaaattagtgaagatccaccgagcccaaaaatgtcagaaacagcgattaaaaaagtaaaaagtggagcaccaatcgtaattcctgctactagatttgtatcacccgttttggcaacaaacatcgtgtctgccaagttgtagatcatggtagtgatcatccctaagacgaccggtaatgctagcttaaagtagaccttttaatcggcgctttagcaaataattcatccataaattttccccccacattgaaaaaagcgacctagaaagatactttgaggtaaacctcactattctaggtcgctacgttatatcatttatttaattttagcatattgtgttaatttgcgaggtgattatctaaattaaagttaccttgaaattcatcagtagtgctttcttgatccataccatattcggcatcgtcgccccagtaaatgtattgtgcgtttttacctttggtgccagcaattctgaagtaaaggccagcttcatcaccttcaccagtggtcttggtggcatctaccttaactttttgaccaatcttgagcaacttgctggttgatttaagcttattattcaaaacatggattttgtttaaaatagtggcggtagtggtgccagaagcttggtaaagggtgttgccgttgacaaagccaacatttgaagcatagatataagcgccattacctaaggcgtagaatggcttacccttgatagtggttgtgttcaaacttctctttttagacccgctaagatttgagaagtagtaaaatacgtcattcttagttgtggcgtgggttttagctggtgttttaactaacatatatttagggatgagtgacaaaccattgaaagtagtgcggtgaccgtttttatcataaatgcgagagttggaactcaagattaaaacattttgtccatccattgagctaacattcaaagatttgatgtagcgttttttaccgatgttaacgtaagaagcggtagtgtagtggtagttcttagaagtttttgcatctacttttttaccttggatcaggataggcttgccataatatttaaaacttgagcctgatttaatcgttgaagcaacagtcatcttcttgccattgactttttgggtagtggtagtggcattgcctttgctgttgaagacttgaactgtgccgttaaaggatttcttgagagtaactttacctttttgtgattgcgtagctgcttgaactgtgtgaacaggttgattgataatagcagctgctggtgcaacactgattaataaagctgctgcgatagttgctaattttttagtagtcatattttgtctcctttgtaataatcccttaagttgattttagcacttatgagactataaaaataacctcgaaactcaaacgttttcggggttatttgattttattcacttaagtacttaggatcaataaatttattgatcacgttgttaaccttctttgaattattgtacttgcggataatgttcaagaagtcttgtgcagttgcttgcttcaagcagtaagtttgatagtaatcgtgtaaagcatcgaagaacttgttttcgcccatggcaacctttaaaacagcagggaagtccatcccaagttcgtaagccatgtcttcagtgtcaacgccctttggtggattattaacagggtagttgatgtagttggccttttgattcttattaatgaattggttagcattttcttttaagattttgttagcacgcttgacgttcttacgagtatagaacttgctgtgcatcagtttagcacagtaagccttactcttagtgtaggtcaaatcgtaaacgccattttcaaggatgttggtaagaccttcgtcaagccaaggttccatgtattcgtcgctgccgacagtgccgtagaaccattggtgaccaacttcgtgagaaacatcttcagttaattcattatatctatcaagtgggtgcttctttagtaaaaagccgctggcatcgatcatgatcaagccaggatattccatcccaccggtatctttgctaagcaagccttcagtaatatcgatttctttgtaaggatatttgccgatctttttggtaaaaatgtgaaaactgtcttgggcagtcatcaaagcaagcttgttgtattgcttgctgtttttgcttgcaaggtagtagtcgttgattcttacgccgtttgcataagcgtggtcaatcttgaacttgttggaagtagcgattgcgaactcacgcatgttgttggcggtaattgtagttttgccatttttggttgtgctttgaccagaagcggcaactttgtagctctttggtgcgaagaagctaacgtggaaattgcttacagcactgttgcggttttcaccagcatcgtagtatgggtgataattccacttaccgttgcgataatcgcttaagtatgggaaacagaatgacaggttataaaccttaccgccgttgatattttggtagccaaaacgatcttgtctcttaggcacgccggtaactacgttgacagttaaatcagtagattcacctatatttagacttttgttaacaaataaattgctcttgtctttaccggtagtgtaagaaagcttttgaccatctgatgaaatgcttttaactgaagttgtcgcatttcttgtagcctcaaaatgcttgtggtcgtatttcaacacgccgctagcaatatttctaaccaataaatttttaacaggttcattaccgttattaacaacgtgcatggtaactttttctgttaattgattcttgcgagtgtccaacttcacgatcatgttgtaatttgttgccttgatcgtaggatcagccgcagcttgaacttttgagttgaagctaaataatgccgcaatggttactgcactcgacaataaaagtgttgttcttcttttcataattttccctccaagaaaaatttattctaattattggaagttatcagcataaagtcaatctattttttgatgataggatataatttatgtataagtgaaaatgaatcccggatttaaaattgaagtgcaacactaagtgttaaacaaaaaggccatgaagacctaaacttgaagtgacgaaaaatcaagaaaggaagatcttcatgaccaattcaaattctagcatttctaagcactatcatcaattaaccagcgtacaacgtggacaaattcaagcaatgctggattccggcataacttcccgtactgttatcgctcaagaagttggctgccataagtcgacaatcagtcgcgaaatcaaacgcggaagcgtcctgcaaagagacagcagctatttattgtatgagcactattacgctgatactgcacagatttattatgagaagcgtcgcaaaaactgctatcagcgcaatccattgaagcattatgctgtctttttgagaatgctctccagacgctttaaagctaaatttgatgccaccagcatcgatgagttcgttggtgaattcaaaaggactatgccaggctacccttgtcccagcacaccaaccgtctatcgctatattgatcagggcttgctggacataagcaatattgatctgcctatgaagctcaaaagacgcaggaacaagcgtcatcacagccatggcggtcacgctttgcacaagaagcatcttggcaattccattgaacagcgtcctaaagagattgaagacagaaaagctccgctgcactgggaaggagatctggttaaaggcgtcagacgcaagaatcagcctgctttaatgactttgactgaaagaaccacacgctttgaagtagttatcaagattcctgactatcgggcaagcacatgccaaaggctgcttcaaaaggagattgacagacatcctgcctggtttaaatcaatcacgtttgacaatggctctgagtttgcggatatgaccaagatcaagggctgccagatttactttgctcacccatattctccatgggaaaggggcaccaatgagaactgcaatggtcttttgcgtcaattcttccctaagagcaagagcatgaaagacaagtcaaaagcttatgttcaacaggcaactgatgccattaaccacaaatatcgccgaatcctccaatatcacacagcagaggaactcttcaagcaatatatctcttcataacctaactgttgcacttaatttgacaattcaggaagtgaaaatgaatagatataaagaaagaagataaataagaatggttaaaagtattacacctcatttgttttatcgcttgaatgggatgcaccatgttgtagcccaagttggtgtagtaaatggtgatcatgtttttgccttgcaacttcttcacagtgcacatgatgtgttggtttatagaaaacatgaaggtttaactaagaacatcgattatactgatccacacttagtaatgatgggctttggccacacgcaaacctgggtagcagctaatgacaaggatgaatatttcgtaggtgctaaaccaaattcaggcaactggactactcaaattgcacgagtaaagtacccaagacttttaccagaaagatatacttcaaatacacaacttccacgtttgtcacacttgaatcacgtaaccgacgttccttatgatggtcatgatcacttgcacagagtagaagcttcagtttcaccaaatggcaagtacttcatgattgcttcaatttgggatgatggttcaggtcactttggtttgtttgacttaaatgaagtaaaccaaaagttgaatgaaaatggcactaagaacacgccaattactgatttgcattgccttagtgcttttcacattgataactttgatcatccaagcgtggcaccaagtgaagaagctccacaaatgattgattctgttcagggctacgccattgatgatgacaagaatatttatatttctaaccaattgtcacccaagattgatcatgcgaatggtgaagttactacttggtcacgtaagatcgttaagtttccatggggtgaaactaatccagagaactggcaagtagcaatgattgatggtattgatttgcctgatcgctacagtgaagtagaaagtattcatgttcaggcgccagatgacatttatctaactgtggcttaccaccaaaaatatgtcaaagatggcgagtttaagttaagaactttggagaatcaaattttccacattagtgatttaggctaaaattagattcttgagactactgcaaaaggtagtctttttatttttgtaaaaaagctatgcaatttatatgcaaacgatatataatagtggtaaatagaaaggagagggtaccatggctgagaaaacaactggactttatgtcagaatgaatcctgaaaagaaagaaaaagcagaagcaattttaaagcaattaggtttgaattcagctactgcaattaatatgttttatgatcaaattattttacgtaatggtattccttttagagttgagattcctaatgcttgggccaacttggactacatgaacaagtatgagtatgctcatctacttgatgaaaagcttaaccgcttggcagagcagaccgatagttcactaggtgaattagccaagggagtcgatcccaagaagaaggacgagtaatttttagttgaggtataaaaatgggtattgttattacgctaatcgttttagttttagttattgcatatatttgttgtggttttagaattgtaccccaaaataatgaaggcttagttgaaacgttgggtaaatattctaaaactgttaaggctggctttgtctttgtttggccattatttcaacgaattcggaaagttccattggcattgcagccattagaaatttcaaagtattcaattattactaaggataatgcagagattactacttccttgactctgaactacttagttactgattcataccgctacttctacaacaacaccgattcagttgagtcaatggtgcaattaattcgtggtcacttgcgtgacatcattggtcgaatggatttgaatgcggctttaggttcaactaaggaaatcaatgatcaattgtttacagcaactggagatctaactgatatttacggaattaaggttgtcagagtaaacgttgatgaacttttaccaagtccagaaattcaaagagcaatggacaaacaattgactgctgatcgtgagaagaccgctgctattgccaaagctgaaggtgaagcaagaacgattgaaatgaccactaaggccaagaatgatgctttggttgcaactgctaaagctaacgctgaagctgttaaaacacaagccgatgctgatgcataccgtgtataaaagatgcaggatgctttagctaaagctggggaaggctacttcagaaatcaaagcttagacagcttcaatcaattagcacaaggtccgaacaacttgattgttgttggaaaagatgagatgacagatttaggaaaggttccagctttaaagaaagtatgggatgaatctggcagtcaggatgacgctgaataatatggaaaagcacttacgtgcttttttgttttgattactgattgataaaatccttttttgacaaagaatttaattaaatttttgagtaaaaatcgtaattaacagagattcactattttactaaaacaacatgctgaaagattagtatgaaaactggtaaaatagataagtaaaagaatagatctatttgttaaaagggagataaaatggctgataaaaaattacttctaatcgatggtaactccgtagcttttagagccttctatgcactttaccgccaactagaatcattcaagagcccagatggtttgcatactaatgccatttatgcttttaaaaatatgctcgatgtactcttaaaagatgtcgatccgactcatgtgttggtggcttttgatgtgggcaaagtaacttttagaactaaaatgtacggtgactacaagggtggtcgggctaagacgccagaagagttgttagaacaaatgccgtatattcaagagatgctacatgatcttggtattaagacttatgaattaaaagattatgaagccgatgatattattggtacttttgctactaagggcgaagaaaatggttttattactacaattgtaacaggagaccgtgacttgacgcagttggcttcagacaagacaacggttgaagtgactaagtcaggtgtatcacagcttgaggcttatactcctgaacatatgaaggaagtaaatggtgtaacgccaactgaattcattgatatgaaggctttaatgggagattcatcggataattatccaggcgttgaggggattggtcctaaaacagcttctaacttgatccaaaaatatcatacagttgaaaatctgtatgatcatattgatgacttgaaagcttctaaacgaaaagaacgtttgattcgcgataaacacaatgctattttaggcaaaaaactggctacaattgatcgtcattctcccgtgacaattgatattgatgacgttaagcgccaaccaattgattatgaaaaattacgccaattctatgaaaagatgaatttccgtaagttcttggcagaactgaatgctagcggtcaaggccaagatgcaactgaagtagaaaaagttgaatacacagttcttgatgaccaaaatgtcaagaaaatcaaagctaatgcagatgaccaaattgaattttatcttgctatgctaggtgctaactatcaccttgctccatttgtcggttttgctttaaaaatcaattatcaaatttacgtttcacgagatgttgaacttttacaagagactaatttgcgacatttattagaagatgagcaaattaagaaaaatgtctttgatttaaagcggacaatggttggcttacatcgattaggtatccatgttcacggtcaagattatgatatgttgttagcttcatatttgatcaataatgaaaataattccaatgatctaggtgaaattgctcacttgtatggtgattattcagttaaaaccgatatagaaatctatggaaaaggcaaaagtgagcatgttcctgatgacgatgaagaactatttaatcatttggcttcaaaggttaatgctatcgaaaacttgaagcagccactacttgagaagcttaaggaacacgaacaagatgacttgtttgatacaatcgaaattccgactgctcgtgtattagcccggatggaaatcaacggaatgaaagtggaggcaagtactctgctcgaactgcaaaatgaatttgctgttcggttaaaagagctggaggataagatctatcaacaagcaggcgagcgctttaacttgaattcacctaagcaattaggtcatattttgtttgaaaaattgaatttaccagtaattaaaaagaccaagaccggttattccacttctgttgaggtattagaccaattaaagacacaaagtccgattgttagtgaaattttagattatcggcaaattgctaagattcaatcaacttatgtcaagggcttgcttgatgtgattcagccagatggtcgcgtacatacgcgttatctacagacattgacagcaactggtcgactttctagtgttgatcctaacttgcagaatattcctacacgaactgaagaaggaaagcaaatcagaaaagcctttgtgccaaccaatcctgatggttacatcttctcttgtgattattcccaagttgagttgcgggtattagcacatgtttccggtgatcagaatatgcaagaagcctttaagacaggctatgatattcactcacatacagcaatgagaatttttcatttagattcaccggatgaagtaacgccattgatgaggcgtcatgctaaagccgttaacttcggtattgtttatggtatttctgattatggtttatcaaagaatttaggtatttctagaaaacgtgctcaagagtttattgacaattactttgaacaatatccacaaattcgtgaatatatggataaggctgtgcaaacggctcgtgaaaagggctatgcagaaacaattatgcacagaagacgctacttgcctgatattcatgctaagaaatttacagttcgttcttttgctgaaagaactgcgattaactcgcctattcaaggatcagcggccgatattatcaagattgctatgatcaatatgcaaaagaagctagatgaactacatttgaagaccaagatggtcgttcaagtacatgacgaattgatttttgatgtgccaaaagatgaattagaaacgattaagaagatagttccagaagttatgcaatcagcagtgaagcttgatgtgccattgattgcagattctggttggggtcataattggtatgatgcaaagtaggtgatttaatgccagaaatgcctgaagtcgagacggtgcgacggactttaactccgctaatcgttggaaaaacgattaaaaaagtagtactttggtatcccaaaattgtggcaacagaccataagaaatttatcaaagaactaccaggtaaaagggtcttaaagattgatcgctatgctaaatatttactgatacgcctaagtgataatttaactattgtgtcacatttacgcatggagggaaaatatcatttaaccactcccgatgcgcctaaggataagcatgaccacgtagagtttatttttactgatcaaactgccttgcgttataatgacgtgcgtaagtttggccgcatgcagctgattttaacaggtactgagcgccaagtgacggggattggcaaactgggccctgagcctaatagcatagaattttcgtcagattattttatcaaggccttgagccgtaagaagaaaaatattaaaaatgtcttgcttgatcaaacaaccgttgcaggtttaggtaatatctatgttgatgagacactgtggcagagtggaattcatcctttgagtgccgcaaataaaattccagcagaaaaagcaaaagagctgtggcagaatattaaccaaactattaaaattgcaacaaaaaagcgtgggacgactgttcatacttatttagatgccaacggaaatgttggtggctatcaagaaatgctcaaggtttatggtcatgcaggtgaaccttgtgcaaagtgtggcacggaactagaaaagattaaagtatcaggcagagggacaaccttctgtccacattgtcaggtggtttattaatgagctatgttttagccttaactggtggtattgcaactgggaaaagtacagcggaccagttttttaaagcaaataaaattcctgtgatcgatgatgatcagattgctcatgatttgatggagcctgggcaagcttcttggcaggcgattaaagattattttggctcagagtatttaaatgatgaccaaacgattaatcgaaagaaattagggcaattggtatttaaggattcgcgggctttaactaaattaaatgagttaacgcatccgttgatttttttgcaaacaaagaaattgctaaatcaatatcaagctcaaccaatagttattcttgatgtcccactttattttgagtcagggatggataagaaagatatagctgacggtgttttagtgattactttgcctgagaaaatgcaattacagcgtttgaaggagcggaatcatttaaccgatgaagaagcaagaattcggatgcaaagtcagttgcctatggtcaaaaaagagcaattggctgattttgtgattgaaaatactggtacaataaaagaactagagaataaactagcacaattattggtaaagattagagaagagggatagctatggaatgtccaaattgtcatcaaaatgcttctcgcgttattgattcgcggcctagtgatgaaaaccgggctattagacggcgcagagaatgtgaaaattgtggttttcgctttactacttttgaacgagtggaaactgctcctttgttggtagtaaaaaatgatggtactcgtgaaccattcagtcgaaagaaaattttgcacggagtaatggcagccggacaaaaacggccaatcagtagtgaacaatttgagcaattggttgatcgtgtcgaaaataagataagaaaacaaggcgttagtgaaatttcatctaagaagattggtcagtatgtcatggatgatttggctaatttggatgacgtagcttatattcgctttgcttcaatttaccgtgagttcaaggatatgtctagctttatgaagacaatggaagatatgatggccaaaaaaggaaagggtaattagtcatgttcgcaacgtctgatcctaagcatctttattatgtagccaacaagattaccctttttccagagaatgagaaaatcttgattaaactgtatcagcctttggttggcgcggtggcaattgccttgtatcagactttgatcaatgactatgatccatatggtattgtttctgattcaaagggaatttattcactacaggagcaacttgattgtagtttaaaagatatgtttcattctttgcataaactggaagccgtaggtttagtgcaaacttttttagcggataatgtcttcaataatatcattgtttttaagttattacaggttcctagtgcagacaaattttttgcaacaccactgctagcaagtttgttgaaagaaaaagttggcagcccaacctttcatgacttgagtcatgcttttgctaaggaagcaaaactgcgtgaaaagccaatcaagaatgcgcgcgatgtctcagccaacttttttgatgtttttcgcttgccaggggatgaagcaattaatccatctaatgaggtagtagaagctgcgcaggaaaataaagcgcctgagatagaaactgctgaaattaatgcccaggatccaattgattgggatctgattaaagatcaatataatgtctatcaaattccagctcaagaagtagaaattaaaaagaaccaaattcggggcttaatacagacatataatttatcggaacaggaatttgtggatgagactgttccctgtttgcatggtacacataaattaaacatgcatgaaattagtaataccatagcagaaaattataaacgattgcatactagggaaaacattcaaaaacaaattgaagaaggcaaaaagcgcgctattgcgactatcaaaggtttggatgctaatgatagaaaactgttactcgaagctaatgaaaattccccatctgaatttttatacaaattaaaaactgaaaagggtggaattgtagctccaagcgaaaactatattattaatcagctgcacacgcagtatggcttgccggaagatttgattaatattttgattcatacctgtttgacctacgatactgttgtaacttctaatcgtgcttatcgaatagctaatgattggctgcaaggtggtattagtactggggtacaagctcttgaatatgtgaagaagcgtaaagccgatattcttaaaaagaaaaatcgacagtcatatcgacaaaataagcgagtcgaaaaaggtaccgattggagcaagaaaaaggctaaaaatgaaggtatgtcaacagaacagctgaaggatatctttaaggatctgaaaaataagtaaatagagggtaggtgaaataatggaagcaattggtgatttgcttaaaaaaatagttaaagagcgtaatttaggtaatgagaaagaactgttgaaaactgctttacacgatccagatgtgcaagcgtttttgcaggcaaatagggaaaaaatagataaggcgatgattcgaaatagtatggccaatatctatgaatattatgcgcaaaaacatagtcagaatcaggtgctggccggttatgctccgcaattatttttaaacggcaaagtaattgatgtacgttataaacctaccgaggctaagattgtagcagatcagcaacgagcagccaagcggcgtcttcatttaattgatctgcctgctaaattgcatgatgttaatttaagtgatattgaggttacaaatgatcgccagcaagctttaaccctgatttatgattttttgaaaaagtacaaagctgatcctcaccaacaaggcctttatttgtcgggcgactttgggatcgggaagacctatatgctagcgggacttgcaaactatgtagcaactaattttgatcggaatgttgtatttttacatgttccaacttttattgcaggtttatcaagtcattttggtgataacagcttgcaagatgagatcaggaatttagctgaatgcgatgtcttaattttggatgacattggggcagaaacattaagtcagtggtcacgtgatgacgttttaggagtaattttacaggcaagaatggataatgttttgccaacctttttctcttctaatttagatatggaagcattagagtcacactttgaggaaacccgtaatgcaactgatccagttaaagctaaaagattaatgcaacgagtacgttttttagctaaagaagtagtagtttccggtcccgatcgacgaaatttttcgcattaatttcaaaaagttcttgcatcgttcactttgatgcgtataattgaagttaattaaacgagacatgatgatgttcggctcagagagaaggacctagttctggaagttcttcattagaaaatcaccccaattgtttattcccaaaattgaattttaagaggctggatacctttatcaatctatacgagaggttagacgtacgctaacctgaattttgggtggaaccacgcaattaacacgtcccagtgcttttattagcactgggatttttttattggaggtaaaaatatgagtttttcaattactttgccagacggttcaaagaaagattttgataaggctgtttcagttaaggaagtagcttcatcaatcgctacatctcttggaaaagctgccgttggtgctaaagtaaatggcgttgttaagccacttgattatgaaattgacaatgatgttgaagttgctattcttactgacaaggatgaagaaggcttagacattttaagagctactgctgcttttgcacttgaagcagttgctaagaacaagtacccagaacttcgtttgggtcaacatgttgctgatgaaggcggcttttacgtagatactgacaaagatgaccaaattaaggttactgaattgccagaacttgaaaaggctatggaaaaattagttaagagtggtcaagcaattgaacatgttgtaatggacaagtcagaacttgaagatattttcaaggatgacccttacaagactgatcttttgaagaaaattgatgctgacaaggttgatgcttacaagttaggtgatttcgttgactttggctttgatgctttattgccaaacactggtaagattaagcacttcaagcttttgtcagttgctggtgcttactggcttggtaaatcatccaacccaatgcttcaaagaatcttcggtactgctttcttcaaggaagctgctttaaaggaagatttgaagcgtcgtgcagaaattaaggaacgcgaccacagaactatcggtcgtgaccttgacttcttcttcgttgatcctaaggttggtgctggtcttccttactggatgccaaagggtgctactattcgtcgtgttgttgaacgttacattatcgaccgtgaagttgctgacggttatcaacacgtttatactccagtattaatgaaccttgatgcttacaagacttcaggtcactgggcacactaccgtgatgacatgttcccaccaatggacatgggtgatggcgaaatgcttgaacttcgtccaatgaactgtccttcacatattcaaatttataagcaccacattcgttcataccgtgacttgccacttcgtgttgctgaacttggtatgatgcacagatatgaaaagtcaggcgctttgtcaggccttcaacgtgtacgtgaaatgactttgaatgatggccacacttttgttgccttggatcaagttcaaactgaattcgctaagattttgaagttaatcatggacgtatacaaggacttcgatattactgattactacttcagactttcataccgtgatccaaagaatactgacaagtactttgcaaatgacgaaatgtgggaaagaagtcaaaagatgcttaagggtgctatggatgaccttggccttgactatgttgaagctgaaggtgaagcagcattctacggtcctaagcttgatattcaaactaagactgctttgggtaatgacgaaactatgtcaactatccaacttgacttcatgcttccagaaagatttggcttaacttacgttggtcaagatggtgaagaacaccgtccagttatgattcaccgtggtattgttggtactatggaaagattcattgcttaccttactgaaatttacaagggtgcattcccaacttggcttgctccagttcaagttaaaattatcccagttaaccttgatgctcatggtgaatatgcagaaaaggttcgtcaagaacttgctaagcgtggcttcagagcagaagttgatactcgtaacgaaaagatgggttacaagattcgtgaatcacaaacccaaaaggtaccttacactttggtgttaggcgacgaagaaatgaagaacggtagcgtaaacgtacgtcgttacggtactgacgaagaaatttctaagagccttactgattttattaatgaaattgatgcagatgttaagtcatactcaagagaaaattaattaatataattaaaaaataaaataaaaaaacgtatgctatgccaggtctaattaagatggctttattgcatacgtttttttggtaaagctaatgtaattgattttttacgtttgtaagtaagaagtaaaagaactgtcatcccctttaacttttatgaaatattttaatgaaataatgaaaataggagttatataaggaaaggtgataaacttgaaaaataagctcattatatttatgacaactgcgctattcatgttagctattattgtaatgggtcaaaatagagtagatgctgcatcctggggagctaagaatttatttactacaccaaaggaaactcgcggaacatggtactataagcaagaaggcaaaataaagaagcttaaaattacaacgcatacatttaataaaatcaaattatataaaatgttgagcagtaatcaagcgattaagtggactaaaaaattagctaaaactgataaaaagtcggggtataaattagctcaaaaagttggtacctctcaatacgaagctactgattttaaattttataaaacagcaggttttgctgccaatggttggctttctagtgatagagctgattcaggacacacttatgttgctataaagaaaaaagataaaagtaataatgataaagtagatgcactgcggagactgtaaaatagtttgtgtaaggatgaataattccttaaatttatttctttaaacattagaaaaaggggttcctttctcgtatgattggtttgaacaaaaaaacacatacagaaagaagaactccttcatgaatgattttaccaaaaatatagcacaagctctattcaatccagacaaaataaacgatttattgcgcaaagagctacaacaggctgttaataacttgctagaagctgaattgactgcctttctgggctatgatccctatgccagaaatggctggaatactggcaattctagaaatggtgcttatttccgcaaggttgatacccagtttggaccaattgaagtgcaagtgcctcgagatcgcaacagccagtttcatcagcacacgctgcctgactacaagcagcactctgatgttttggaaagcacgattatcaagctctactccaaaggcgtaactaccagagaaatcgctgacttgattgagaaaatgtatggcagtcattatagtccagcccaagtatcaaatatttccaagcagatgctccccaaggttgaggcttatcacaagcgcaagctaagcgacaagtttttctgtgtctatttggatgcgacataccttcctttgcgccgagaaacgtttgagcgtgaagcagtctatattgccattggcattaaacctaatggacataaagaagtcattgactactgcattgcgcctagtgagaacattgaagtctggacagagatgcttcaaaacatgaagtccagaggcttgaagcaagttgagctctttctttctgatggtgttgttggcatgaaagcggccttgaccaggacttatcctaaagctcattttcaacgctgcctggttcatgtcatgcgcaatatctgtgctaaagtctgggtggatgaccgcgaaaagatcatgaacgaattcaagcagatacatcaacagacaagccaaaaagaagctgcagctgtcttgcatgaattttatgcaaaatggaataaagcttatagccatgttatcaaaggtttgagggaaattgagcccgatctgctggtcttctacaattatcccaaacaaatcagagcttcaatttattcaaccaacatgattgaatcctttaacaacgtcatcaagcgtaaagctaagcctaaggcagaatttccaactgaacagtcgcttgatgtatttattggcatccaggcaatgagctacaatgaccgctatttcaaccgaattcataaaggctttggtcaggttcaggacaccttagaatcctactttgattaaataaataattaaaaaatcaatttacgagaaagatctatttacacaaaagatttgacagtttcgcactgcgagtaggaaatggagcagataattcatttttatattattgttataagagcaaaaaattaatcaaataagttacccggatttaaaattgaagtgcaacactaattgttaaacaaaaaggccatgaagacctaaacttgaagtgaccaaaaatcaagaaaggaagatcttcatgaccaactcaaattctagcatttccaagcattatcatcaattgaacagcgaacaacgtggacaaattcaagctctgcttgattctggcataacctcctgcactgctatcgctcaagaagtaggctgtcataaatcaactatcagccgtgaaattagacgaggcagtgtcctgcaaagagacagcagctatgtcttgtatgagcactattacgctgatactgcacaaatttatcatgaaaagcgccgcagaaactgctataagtgtaatccactgcaacactatgccgtttttttcagaatgctaagcagacgctttaaagccaaatttgatgccactagcattgatgaattcgttggtgaatttcacaggattatgccaaattatccatgtcctagcacgcccactgtctatcgttatattgatcaaggattgctggatataagcaatatcgacctgccaatgaagcttaaaagacgcagaaacaaacgccatcatagtcatggtggccatgctccgcataaaaagaatcttggcaattcgattgaacagcggcctaaagaagttgaaaacagaaaagttcccctgcactgggaaggcgatttggttaaaggcgtcagacgtaaaaatcaacctgccttaatgacactgactgaaagaaccactcgttttgaggttgttatcaaaattcctgactatcgggccagtacttgtcaaagactgcttcaaaaggagattgacagacatcctaattggtttaaatcaattacgtttgacaatggttctgagtttgcggatatgaccaaaatcaaaggatgtcagatctactttgctcatccatattctccttgggaaagaggcacaaatgagaactgcaatggacttctgcgtcaattcttccctaagggcaaaagcatgaaagataagtcagctgcttatgttcaacaggcaactgatgccattaaccgcaaacatcgtcgaatcctccaatatcacacagcagaagaactcttcaagcaatacgttccttcatagcctaactgttgcacttaatttgacaattcaggatcaaataagttataataattttattgatgtgttcaactacatttttatatttttgcactgaaatcttaattcagtgcttttttcataaggattagactaaataagatgataatacgccagcgaaaaaattatttaacttctcaatttttatctaagattagtgccgatgggactttaaatattgaaaatttaattgtcctgacttgtgcaatttttattgcaagtattggactaaatgttaattcaacagctactattattggcgcaatgttgatttctcctctgatgggaccactactagcaattggcacaggtcttgctttatatgatgttcacttactgcgtaaaggaacaatttcattattagcagaaattattatcagtttagctgcatctacaatttattttcatttttctcctttgacttatgctagtcaagagattattgcacgaacttcaccaacaatctgggatgcgatgattgcgttttttggaggggtcgctggaataatcggagctcgcaaaaaagaagcaaataatattgtacctggtgtagcgattgcaacagccttaatgccaccggcttgtacgatagggtattcaattgcggcaggtaatcttaaatattttttaggatcaagctatttatttttgattaactgtgttttcataattttgactgcattcatgggtgtaaaaattatgaagtggttaagttattctactaagcaatctaagttgtttttcttgcacaagccgacctttaaagagtttgtgataattttagtagtaattattttaattattcctagtatcttgtcagctaatcagatggtgaataaaactctagtagatcaaaatgttcaaaatcttgttgttaatgaattaggcaatgttaatttaattaaggaaaatgttgatacgcaaggaaaaataattaatcttacagtttcaggcgataaaattaacgctaagaaaattcaagcggctaaagcaaacttaacaaaatatgacctgaaaggctattcactgaatattgtacaagtagctcaggttaatcccaatgcagaaaatcaattagatcgacaagtaaataatattattaatcagcgtcagcatgaacaagaacaagctgatgaaaaacgtcaacaagaacaagaaaaacgtaatcaaaaaattcgcaaactgtcatctgcaatatcttctgttactgcagttagtgataataaaaataagcaaattactttgatagagttaaaaaagccgctatctaagaagagaaaaaacgccttagtaagacaaataaaagataaatatccaaatattaatttagtggaatttgttcaagaaaatattaaaaattagaagaaactgtcaaattttttgtgtaaatagatttttctcgtagattgattttttaatcttttatttaatcaaagtagaattctaaggtatcctgaacctgaccaaagcctttgtggattcgattgaaatagcgttcgttgtagctcattgcttgaatgccaataaaagtatcaagcgactgttcatttgaaaactctgctttaggtttagctttacgcttgataacgttgttaaaggattcgatcatattggtggagtaaattgaaaccctgatctgcttaggatagctgtaaaagaccagcagatcaggttcaatctctttgagatttctgatgacatggttgtacgctctgttccacttgtcatagaaggcgtgcaagactttgatcgcagcttctttatttggctgttgatggatttgcttgaattcattcatgatattttcgcgatcatctacgcgtactttagcgcagatattgcgcatgacatgtaccagacagcgttgaaaatgagctttgggatatgtcttttccagtaccgtcttcatgcccacaacgccatctgaaagaaagagctcaacctgttctagaccgcgagacttcatgtcttgaagcatttccgtccaattctcgacgttttcgctgggagcaatgcggttaatcgatgacttacttgtggccattaggcttgatgccaatggcaatataaactgcttcacgatcaaaggttatgcgacgcaaagtaatgtaagttgcgtccaaataaatacagaagaacttatcgctaagcttgcgttgatgataggcttcaacttttggaatcatctgcttggagatgttagatacctgagctgggctgtagtgactgccgtacatcttttcaattaaatcggctatttctctggtggttacgcctttggaatatagcttgataatcatgctttccaagacatcggagtgctgcctgtagtcaggcagcgtgtgctgatgaaacatgccgttgcggtccctaggcacctgaatttcaatctcgccaaattgcgtatcaactttacggaaataagcaccattgcgtgaattgcctgtattccagccagctctggcataaggatcatagcctaaaaacgcagtcagttcagcttccaataagtcattaactgcttgctggagttctttgcgcaataaatcgtttattttgtcttgattgaatagagcttgtgccatatttttggtaaaatcattcatgaaggagttcttctttccgtatgtgttttttgttcaaaccaatcatacgagaaaggaactcctttttctaatgtttaaagaaataaatttaaggaatcattcatccttacacaaactattttacggtctcattatatctgtatattaatgcacaaatgctgttatatcaacgattagatactttgctttataataaacagtgttattataaagatgccgagagggatagaggcaataaagaattagaatcgaaaggtgatatatatgttagatgttttaaataacaaagtagaattaagcaacgtacattttgcagaacacaaattagcaattgaagatgctaaaacaatgttagaaaacgaaggttggattgctactaagtaaaaagtgttgataattatgaaattaaaaacagaaaatgagacgcacgataaagtacctcataactgctataaattagctagtagttatgagtcgttttttattttttgcttgttatctattgatttgtagctaattctatatgacaatgatatctaaattattgaactataataaaaatccgttattttaatttggtctaagttgctatatattcaaaaaaatcgttaaatttttattatttatttggcggaatatgatatgaagaaacgtttcaaattagctgctatttttgtggctgcaatgttcgcagccgcacccgttgttggtatggcagaaacatcaactactgtttcagctgatgctgacatcatgcaacaatacacttttaatgactcagttttggactttactcctactttaaaggtttatattgctaagggtcacaaatttaccaccagtaaagaaactgcttacaaggcaaaataattaggattgattccgaaaatatagagctgttagatttaccgtggtctagcagcttttttgatgcaaaaaaataccactcaccgttaaatttagaccattcacctgaatttaataatttaacgaaaataagcaggtatactaataatcaatcaaggagggatgcaattgaaagttaaattgaatatcgatccaagtttaccagaagaaaaagctgaattttggttaaagaaaatgactgctagatttgaacggattactaaagagttgaattcggagcaggattttctttggtgctatctagatggggatgcctatgaaattaatttttctcaaatctatgcaattcaaatagaaaatgaaaaaacaatgatttgtactcaaaatcaaaaatatgtttataggggcagattgtatcaagtacaaagtgttctacctaacgattttataatgatttctagaggtgctattgttaattatcattttattgatcatctagaaattataaatacaggcaatattgatgcgcttttggagaatggactaagagtacaagtttctcgtagaagaataaaggatttaaaagagaggctaggattatgaaaaatattaaagatcttttatataacggtctgattagtggactgattggtattggtatcggtacgatctggatggctatggacttcttgttttcactaaatggtcaaaatcctgcaacagcgaagatatatttgaaaacctttcttttttggacgattatttcttttctcattggtattttcttttatctagctagctggatttttaatagtgaaaaatggtcattgaaaaaacaaatttttattaatttcttcgtctgttttgttgcctggttcttgttaaacctcctaattgataattttagtatttcactaaagatggttattagagtaacagttgattttattattatgtacgctattgcatacggtggatattttttacatttatggaacactgttagacgaataaatgcaaagttaaaggaaaaatagaataccataattaaaaaatgaaagaggtacccttgcatgactttattatctgtaaataatatttcaaaaacatatcaaaaagcacataaaaaggcggtatctgatgtttcatttaatgttgatagtggtgatattgttgccttcttaggtcctaatggtgcaggaaaaactacaacattaaaaatgattcttaatttagttagtcctgataaaggaacggttgtattcgacggaaaagatgtaactcacaacaatctctttttattgaaaaacactggcgttttattagaaggatctagaaatatgtattgggccttatcaccaatggaaaattttgtttattggggtggccaacgtggtttaagcaagaaagaggcagaaaaaagaggagaaactttcctcaaacagtttggtctgttggataagaaatacacctctattaccagattgagtagaggtatgcagcaagttgtgggaatttgctgtgctatgattgccgaaccaaagcttttaattttagatgagccaactttaggtttggatcttaatgctactcaaataatgattaagagtctgaatatgttatccgccaatggagtagggattctagttactacacatcaaatggaatttgctcaagagatagctaataaaattttattaatcaatcatggtaaacttgtcttttctaatagtataaaagatagtttgaagaagctgaataaacaagaaatttttgaagtgcatttcacccaagaacttaccgcctcagaaaaagaggatatacttgcaagctgtgaacttacaaagaagactgacggagtttatcgtttgggtgttaaaccgcaagcatctctttcacaagtacttaaattattgagtgaattaccaataagtagtatacaaactgtgactagaggattagatgaaatttttaagtactacacggagaaggaaaaatgataagttttaaagctgaattttggcgtcaattctatttatataagagatacctcttcaattatatttcagaatttttcttattaattttaatgtttatggctattttttggggcggtagccttgtaggaggtggcgttttaggaaaatcattgaatgccctagtagttggctatgttttgtggagtttaattgaaaacactattagccaaatgggctaagtgtataattttttacggtaagttgaataaataattaaaaaagcccaagtcctttgaatttggacttgagctcaaacaaaaagaccagtagtctgatgttaagaacaaaaaacacattagaagctggtcttttatgaattcaattgtaactgaaatcgcaaatattataaagtctgaagataattatattaagcgtgaaagaaaaataatctgtttcttcttaaacctgattaaggaaatcatggccttggctttagctaaagttgatgatgaaatgattaccaaggttaaagcacagggctatcagattgataagaagaatgagcgctcaatcaatatggcttttggcgaagttaggtatgtcagaagaagatatgtctgcccaggcaaacaagcaaggtatcccttggatgaattaatgggctttgacaaatacaagcgctacagtattttagcagtcaaaaacatcttagaagtaagcagcgttgccacttatcgcaatactgctctagcagtcaattgcctgtctggctttaatattagccatatgcaggtgggcaatttggtaaaaatggccgggaaaaatattaaagcgggccaagaagcagattcaagatatgatgccgcaggcactaagaaaaaggtcccagttttgtatcttgaaggcgatggcgtggtgatcaaaggcactaaaagccggttggaatttcatcgctatcaggtctgtgaaggcattgtcaatataagcaagaaacgcagaaagcgaatcaatgccaaggaatttgtttctttaagccgacttgatgcgctgaacgaagccaaggagtacctggccaatacttatgatctttctgatactgtaattcttagcaacgccgatggcggtgctggatatgccaaaacagacttcgatgacattgtagggctatgcaagcgtcatgagcatttcttggatgtctttcacctaaataagaaaatcaaagaaaggctatattttgcgcctgacctgcaaggcaagctgatttctgctttggaatacaaatacagctatgacaaagttaaaactatcctaaccactgcagaaagccgactaattgatgaattgaataccgagctcaatcatgattatctggggcgcctaaggaattatattgatcgtcattgggacgatattaagccgtttaagaaatgaaaactgactgtgactaaagccattggctgctgcgagagcaaccaccgcaagtatacctaccgtgttaaggggcaaggcaagaaatggtcaaaatctggagcagaaggcatgcttaggatcttaagctgcatcaagaatcgagagctggaattttggcttagcagcgagtttgaagattcagaaataactgtattgactgaacaggaattaaaagcagcggcccgtgacagcttaaagaagcgtcatgaagttcatttaggcatccagcatggcgcattaaccgcacaggtagctggcaatagttatttaagcaagctaagcagaaatttaagtcatataaatatttaagaaattaaggttagactaatggtttaaaggctaccgcaaaaacattgacacttacccaaatgggatcaacagtgatgaataatgccaaaagtggtattttagaacaacaatatcttatgccaatttcttctagaagattatttttaaataaaagtattgcaaatattgttgtggcattcgtccaagcaattttaattctgatagcagtaatggcaatttctgatcactggattagttttccagtaataatgattgttccatttatattagctttactaactacagtgggattaggctatttaattgttagcttagttttacgttttaaaagaattggcagtaccttagtgatttttcaatatatttacttaggtatactactagttaattttgaaaactactccaatcttacaaaatgcttatcttgtttattgccaatttgtccaatggttagttggatgagattagcagttaacaatcgaccatacaatttagcgttttatttaagcgaatctatctttaataccgtattatggttgattattggattgctagtatttaatttagctgataaatatgtaaagaaaaatgggactttatctttttattgattttagttgctaataaattcattcatccctgaaaagtgattcttgcccacaaaaatttcaaggaataacttctacttatgcattgttctgtggtaggaacgctgtaaagtttgtgtctgcagcttgggtaaataataacgatcttcatgtttaaaaatagggcaaaaattgctctatttttagctcccattagaattttccgtggcataattgacgtataaatttgaaagggagatataaaaaatgaagaaaaaagttttatcatttattgccgcttttttagttgttttaggtttggctagcgttcatgcaaacacagcaaatgctgctagttagggtgctaccaaacttttcaccacacctaagaatacgcgtggtgtttggtaacacaaagaagctggtaaagttattagaactaaaattactgcacatactattaacggcctcaaggtttataaggtattaaagggtaaagaagcagataagtgggataaaaagttaactgctgccgatgaaaaggctaactacaaattagctgacaaagtttctagctcacaatttgaagcttatacctttaaattccacggtattacggatttcaacgcaaacggctggcttgctggtagcggcgacggctactactatgctcctatgaagaagaccgttaagggtaagaaagttaatgctttgcgtgtcggcggcggtgctggcaactactttatcagctacgcttacaaggataagaaattagcgtaaattgcaataataaattgaacacttaagctgcttgatagattttgtctaattctctttcaaagatttcatctggtgtgtgatatgccaatagttttcttggcaatgaattacaccaggtttcaatatcaatgatttcttgaagagaatagttattgatgtagtcacctttaggaatgaatctgcgaataaggccattgtgtctttcaacagtgcctttatcacaagaagtatacggatgagcgtaatagactaaagtgttagatactttctctaagttggatagatccgcaaactctgagccattgtcagttgtaatcgttttaaaaatttcattccagtgtttctatattgactgtgcaaggattgaaaagctgacattacactgttagccgttttatccggaatacgtatgatcaagaactctcgactcattcgttcagacaaagttagcagcacttgatcgtctctagtcttatgtcctaagactaggtcacattcccagtggccaaactcttttcggtcttaaatcactttagggcgctcttcaatgcttcgacctagtttctttttgtttttacggacacgatgaattttaatgttacgctttaatttttcgggtaaatcagagtttctgatagccaacaagccttggtctacatagttatacaacgttctagtacagactgtttattcgctgctaaattttcctatagccagacagcgattggcgcatacatcaagcgaccaattattttcaaagaagtgcttaatgacatacttaataaagtcattcttctttaagaaatctgacttgcgaccgcagcggtgacgatccaagtggtaaacttcattaccatgttttgctttatatcgcttttgcttgccattataaagcaaaactgtgccacgcttaacttcataactgatcgtagaaggagaacagccaatttcacgggcaatagctctaagagagaagccatccttgatacgagtttaaataataactcgctcttctagtgataaatactttcccttttcgtgcttaggcatgatagaatgtaaagagtccatttgtgacctcgtttctgaatgttttgtggtaattacattttatcaaacaggtccaaatggactttttatttttctaaagtgttcaatttgattttacaatcggcgaaatagaaaatatgttaattcataagaaaattatttttcaaataaaggcactttcttttgtgatttaacttcaaaaagacctttatcagagatttttagactaggagaaacaagtaaagacaaagtagagaaagacataatttcgtttgtatttttatagcccaattctacgagatttttacgtatattaccaatttgttctcctaaaatcttcattggttgattgcttacaactccaccaattggaagaggagcattggctgcaatcttttcacctctggcgactatataaccaccttgctgattaattaattgatgttgaatgtcaatcatgccatctatatttgttcccattaccatcaaattatggtgatcgtgagcccaggttgcccctacagcaccatcaccaataatgccacgatcaactaggcctaagctaaatttaccatcatttaaaccatatctttcttggacaataattaaagctaaatttgcactttgccaatcaacgatatgattatgtacagctagccttttttgaatatgatttgtaaaagtaccgacaggatttatttgaatgacatttgctgtaactgagccattatcaacaagatttgttttaagtaataggtcttgtttagttaatttaggagctttcacactagtagttagactattaggtgaaaaatcatcttgagaagtatttttgatagtctcttttgcggatattccatttttatagacatcagctattgagagttcttctaaattatccagaatggagaaatcagcaactcttcctggtgcaattgcaccacgatcccataatcccatatgtcttgcaggaatataggtagaaatataaatggcgtcttctggcttcatccccatattgattgcttttttaactaataaatttaagtgaccttttaacaaagtatcaggcattgaatcatcagtaactaaggctacatgttcaaaatatttattatcaataatagtattgatgacatctggatgcatggattttaattgaacttcaacaaacatcccgtttcttatcttttcattgactaaatctctagtttgttgagtatgatcagtagtaacaccggcatataaaattttagctaaatcttcaccatgataagcaggggtatggccttcaattggcatagtaggtttagttttatgacaagtattaattatgtccttaattagagtgtccttgtcagaagtcatatctttaaagttcatgacttcacctaagcaaataaagcgtggatctttaagtaattcttttacttcaggcacaccaattttaccgccagttgtttccatttgaggattggttgaaggaacagaagaagggatgccgaagaaaatatcaattggcgaatcttcattaatgaaatcttttaatccattaataccggcgacattagtaacctcatgatcatcagcaataatagtagtcgtgccatattttagaattgtttcacccattattttaggtgtagtcattgagctatcaatatgcatatgggcatctacaaaaccagggattaaatatttaccttgtagatcgatgactttttttgcttttaaattaggtaattctttattaatccaatagaatttgccatttttaatacttacttgaacatcttgaaattttcgtaaatatacattaaaaacatgagcatttttgataattaagtctacctcagtcatttaaaatcctccataaaagataaggagctgaatctacaattcagctccttatagggaataaacatcaattatttattcataatcttattccatcttgaaatccagttagacatatgtgaatttacaaagaagaaattaatagtttttgctcttttagcaactgagccataagttttgtttgctgcttctgcaggtgttaatttaacttgagtgtttacaggagcgttgttcaaagatttaagacctgctactttcttttgaattttttcgcttaatctaaagttgatgtatttgtatgcagctgctgaatttttactattctttaaaatagagacattatcgtagttagcatatgtaccagacttaggaacgatgtattttaagtttggattagttgcttgaagcataccaacagcataatcaccaactacagcagcttcaatttcaccagatttaaacatgttacttaaatctgaactttgggtgtaagttttgacaacattaggttttaattctttcattgccttaaatgctgcatttccgttgtctttagttacactagtaccagcatagtcaccagcaatatataacattgcggggccaaaagtagttgtcatatcaggtacagcaatcttatttttaagtttagatgaccataagtccttccaagaattaatattaactttctttggattatagataatacccaaactgtttacggtataaggaactgtattagtttctttagctagtttttgttctgattttgataaatatttgaaattggaaatcttagagaagtctaacttcttaaataacttctttttatcgccagtaacagcattgttttgagcaagttcaattacatcaacacctgtattagggttatgttcaatttgagtaagtcttgttgcactatcaccaaattgagtttttactttaactgatgattgtttagcaaaaggatttaaaacatcgttccgcatttgtttggtagataaaccaaaggttgaaacagttaaatttcctccgttagaagatgattgtgatgaacatgcagttgtaccaaatgcaactgaaccaactaataaaaaacttgcagctaataaaccaacttttttaaaattcatttttattcctttctttacaattggttatctagacaacggatgaagatgcttggagggcaaataaagctgaactttatctcctgagctacgcatcgatttcctagactcttcaacagtgaagtctccgagactagtacttaccttatatttaaagctctgacctaaatactcaagactagtgattgttccatcaatcaaattattagacggattttcttctgaattaatcaaaatattttcgggtctaatagttaataccttagcttgaatattattttcatcagttaagaaaacaagatctttacttttaatttggcgatcattaataatttcatcaacattgatgaaattatcataaccgatgaatctagcaacatattctgaactagggtggtgaaagatgttttcaggagtatcatattgatcaattttgccatctttcatgattaatactttatcggaaatagcgaagcattctctttgatcatgagtaacaaaaagaactgtcatttttagcttttgctgcaattctctaatttcgctacgcattttaattcttaattttgcgtctaaattactcaagggttcatccattagtaataattgtggattgactaccaatgcacgtgctaaagaaactctttgttgttgaccaccagataattctttaggatagcgagaagctaatttagacaagccggttatttttaaaatttgatcgactcttttttgaatgtcacttttagacatctttttcatttttaatccgaaagctacattattaaagacggtcatatgtgggaataaagcgtaactttggaaaaccattccaaagtttcttttgtaaactggtacttttccaacatcttcaccatcaactaaaacttgtccgtctgttgctggaattaaacctgctatgattcttaaagtggttgttttaccgcaacctgagggtcctagaatagatactaaatcaccgttttttacggaaaacgaaatatcttttaatactttggttttaccgttatatgattttgctaaatcttttacttctaaaattgccaatttaattgttcctatcagtaagtttatttagaccaactagtttttcagttaaaagcataattaatgctgtaaaaatcattagaactacagaaatagcagaaacagttggatcatagttgttttgtaaatagttcaaaattgctggtggcagcattgtaattgatggtccattcatgaacaatgaaattggaatattattaaatgaattaataaaacacatcataaaggctgctacaatacttgctttaatgttaggtaaaacgattaagaagaatcctttctgaggtgaacatccacaaacccaagctgcttcttcaatatttttatccattagtaacatacttgctgtaactagtcttattacataaggtaggcataataaaaagtgaccaataattagactaggcataacaggtagtctaagagtaacgacagcagcttgatataaggcaaagccaattacaatttctggaattagagtagggcttaagaagaaagagtgaaaccaagacttatgaacgatgttgaatcttgttaaagcataaactgcagggataccaattattaatgccgaaagactagcaataatggcaacgaacaaacttgattcaaatccactgataaaatctggttgctgaaaaatattggcataccaggataaagtaaaacctttaattggtagagaaattgaatcctgattattaaatgaagtaataattactaaaagtagaggaaacatcaataatatcaggataataatagaaataattgctaaagttttatttttacgattaagcattaatattaggtctcctatccaaagaaactgtcaaatcttttgtgtaaatagatctttctcgtaaattgattttttaattatttatttaatcaaagtaggattctaaggtgtcctgaacctgaccaaagcctttatgaattcgattgaaataacggtcattgtagctcattgcctgaatgccaataaaagcatcaagcgactgttcagttggaaactatgccttaggcttagctttgcgcttgatcacattgttaaatgattcaatcatgttagtcgaataaattgaagctctgatctgcttgggatagttataaaagaccagcagatctggttctatgtctttcaagcttctgataacatggctgtaaaccttgccccatttggtatagaagtcatgcaggacagctgtggcttcttctttgtttgtctgttgatgcacctgtttgaattcgttcatgatcttttcacgatcgtcgacgcgtactttagcgcagatattgcgcatgacatgaaccaaacagcgttgaaaatgagctttaggataagtcctggccaaggctgttttcatgccaacaacaccatcagaaagaaaaagctcaacttgctttaagcctcgggatttcatgttttgaagcatatctgtccagacttcaatgttctcgctaggtgcaatgcagtagtcaatgacctccttgtgcccattaggcttgatgccaatggcaatatagactgcttcacgctcaaatgtttctcggcgcaaaggaaggtatgtcgcatccaaatagacgcagaaaaacttgtcgcttagcttgcgtttgtggtaagcctcaacctttggaatcatctgcttggaaatatttgatacctgagctggactgtaatggctgccatacatcttttcaattagatcggctatttccctggtggtcacgcccttggagtaaagcttgataatcatgctttccaagatatccgagtgctgcttgtagtcaggcagcgtgtgctgatgaaattgaccgttgcgatcccgaggcacttgcacttcaattgggccaaattgcgtatcaactttgcggaaataagcaccatttctagagttgccagtattccagccatttctggcatagggatcatagcccagaaaggcggtcaattcagcttctaacaagttattaacagcctgttgtagctctttgcgcaataaatcatttattttgtctggattgaatagagcttgagcaaaatctttggtaaaatcattcatgaaggagttcttctttctgtatgtgtttttttgttcaaaccaatcatacgagaaaggaactcctttttctaatgtttaaagaaataaatttaaggaatcattcatccttacacaaactattttacagtctctatccaaagcgcgacttgcttttctcattaatatcattgataaagcagagataataatcagaactattgcaataacacttgcatttttccagttacctaatgtcatggcttgttggtaaatcaaggtagacattactaaatttttattacctcccaaaatttgtggggtagtatatgctgtcatcgcacctgcaaagaccaaaatgcatcctgttaaaatccctgagactaattgtggtattacaatttttatcaaattaacccatggattggcgcctaatacagcagcagcttcttctgcttcaatgtttagctcagaaatactaccaactaatgaaataatcataatcgggagaaataaataagctgaaccgatgataattgccgtatcagtataaagaatgtttaatggagaattaattaaatgaatagacatcagaaatttatttagaataccgttacgacctaaaataatgatccatgcaaagtttctgacaactgcattcgttaacattggaaaaagaatgataattgttaaaattgatcttactttgctcttttgacgagcaatccaaagtgaaattggaattccaagaattaaaacaatgatcatagtgagtaaagcaattttaaatgttctaccaattacatgaagattgtacgtgttttttagaaattcagtgtataggtgcaaaaatcctttagaatcttgaaatgttggtatagcaatctgaattaatggaaagaatgcaaaaatcaagacactaataaatgccggaaatagcagccaaaaactggattttattttcatattgttcgtattcctccttatcttgtcttagaataatttaaatgtaaaaataagtcaatacaaaatatgaattaaaataataacatttgtgttaattgtatgcgtattgtattatttatgaatataaatagatttatttataaatttatcttcttgaaaatacgaacattaccaaaaaggaagtggagttcttaatgaaaaagccagttattattagtacagatccaggaatagatgacgcagttgcattagcaatatgtcttttttcgcctgcaattgaagttaaaagtattattgcaactaatggcaatgttaatgcgcaacaagctttaataaatatattgaaattggagaaatttttcggtaaaagtattcctgtagtaaaaggggtagagcgttcattagtcaaacaatctattcgagctaaagaaatacatggtaaatcaggaatggacggatatgattttccaaatcctagttttgaattggtggatcatggcatatcaccggttgccatacataaaatagttgcagcttcttctgaaaaagtaactcttattggaattgcaccacttactgattacgctctatatgttcgtttatacccagatgatataaaaaatattaaggaactaattattatgggcggagcaatgggtagaggtaattatggtatctattctgaattcaatattgcatctgatcctgaagctgcaaaaatcatttttgaaagtggattaaaaattagagtagcgcctttagaattaggtgcacaagctaaaattatgcctgaagtaagtaatcaaatacgacagttaggaaaagctggtgatatgttttacgacttatttaagaaatttcgaggtggcagttttcaaactggccttaaaatttatgatgcacttgcagcaggcgtacttttaaatccgcaaatgtttaaatttaaaaatacacatgtagaaattgatgttcaaaccggttatacatatggtgcttcattgatggattttaaaaataagctagatcttccaaataatgctgaaatagcagtgtctgtagatccagaaattttttctaaatggtttgtagaagctttatcaaaaacaagataaaaaagtcaattaattgtcaacaattaattgacggataatggttaagcgagtatactactactagttgagaacaagaagaagcacccgcttctcgcctaagttaagtaaacctctaggctgattgataatttctgttgattaaaggcgggtatgattcttataacccgcctttttcttgtcctcaaattaacacggaggtgaacagttataccaagaagtttaatcttaaacgacagaattcgcgctcgcgaagttcgtttaattgatgaagatggtcagcaagttggtgtgatgagtaaaagtgatgccttacgtcgtgcaagcgatgcaggtcttgacttagctctgatttctccaaatgctaagccacctgtagcacgtatcatggattacgggaagtaccgctttgaacaacaaaagaagcttaaggaagcccgtaagaattccaagacagtcagtgtcaaagaaattcgtttgagtccaactattgaaggtaacgacttcgaaactaaacttaagcacgttcgtaagttcatttctaaagaaggagctaaggttcgcgtctcaattcgttttagaggtcgtgccatcactcacaaggaattaggtcaacaagtacttgaaaaaatggccgaagtaacctcagacattgctaatgtaattagtaagcctaagatggaaggtcgttcaatgttcttgatgcttgcacctaagagtgataaggacaaaaagaaaaagtagttaattggaggaaatagaaatatgccaaagatgaaaacacaccgcgcttctgctaagcgttttaagagaactgcaaatggtggtttaaagcgtcaccacgcatttactggtcaccgtttccacggtaagacaaagaagcaacgtcgtcacttgagaaaagctgctatggtttcaaagagtgatatgaagcgtatcaagcaaatggttgctcaaatgcactaatacttgttcttaattaagacagactatagtaggaggaattttaaatgccaagagttaaaggtggaacagtaacacgtcaacgtcgtaagaagatcatgaagcttgccaagggttaccgtggcgcaaagcacatgcaatttaaggctgcaagcactcaattattcgtttcatacaagtacgcattccgcgaccgtagaagacgtaagagtgaattcagaaagttatggattgctcgtattaacgcagctgcaagacaaaacgacatctcatattctaagttaatgcacggcttgaagttggctggtgttgacatgaaccgtaagatgttagctgatattgcttacaacgactcaaagacttttgcacaattagcagaaactgctaagaaagctttgaactaataacaaaagaaataagctagggaaattttcctagcttatttttttatctatttttgaattaatgctcgtaatctaattttttcatctggcgtagtaaaggccgcgtcaaccgcgttgagataaagagtggtttcttcttcaggagtcaaggcggtcttttcttcaagcagttggtattcatgcggtaaattggtattggaaacgatcatatcatcagaatttagcgtgactttcattcccatgtgcaataatttttttattgggtaagaatcaatctgatcaaaagctttggtgttcatatttgaagtggcgcaacattccaatatgatttggtgatcaatcagatattgggtaagtgctggatcttcagtgcagcgaatgccatggccgatccgtttcgcgccaatttttaatgcttgacggattgaatcaggtcccgcagcctcaccagcatggatggtataaggaaggtgtaattcttgggcacgattgaaaaaatgctggtagttaatgtgagggatcgggccttccgcaccagctaggtcaaggccaacaacgccatgacctaaaaattctttcgctagctcaaccgtttccatgttttctttttcattgtgggcgaagcgcatcaaacagagaattaaaccagcgtgtaattcaggctgatctttgtctgctttttgtttttgataaaacttcgtaataccgctgactgctgcagcgattacttgtctttgcgttaaaccatttttagtatgtaattgcggtgcaaagcggatctcggcgtagactagaccttgttgttttaattcgcaaagaagatcaaacacaatcatctccagatcatgctttgtcttcattaactggttaggtaagtcaaacttttccaaaaattgttccaagctagcgcaagaattatcaactgacaattcttgccgcaatttttgatcagttaactgtggcatgtgatgttcctgcattaacttcttaacagtagcaactgggacagaaccgtcgaggtgaaggtgtaaatcgatgaattttctcatggtgatcctttctgttgattgatgattttgcttaaattgtttagtattgtaacactttttcatcagaaaaaaacaaaaatttctaaagcaaacccatttttgatatgatataaggtgataaaaaatggaggaaattaacagttaaaagatagacaagatacaaagatctgttcagaaatataaaacatagaagcaggtcaaaaactaaaaatttaatattttgttcgcttgtatttatttcactctttgctaaatttatgtttgtattggaggtgaaacaaatgatcaaggctcaagtagtcgaattaaaacctaacaagaccatgcaacaagagctggataagctttgtgattatcgcagatattgctggaatcaagctttagccacttggcaagacatgtatgaagcacgaaccttagataaggataataatcccagtccaaatgagcgcagaatacgtgatgagctagtcgataataaggcagactggcagtttgctctgtctgctagatgcttgcaattagcagtcaaagatttggctaatgcttggaagaatttctttgataaggcacagcctgattgggggaaaccacatttcaaatcaaagaaggccccgcgacaaggctttaagactgaccgggctaaagtggttaatggtaagctacgcttagacaagcccagaggcattaaaacctggttcgatattccaacatatgaagctttaaaaatgaagcaaattaaagttgctagtgtctttagagaaagaggacattattatgccgctctttcttatgaagaagaaactttggtaaagcctagaacaggtagaaagacagctgttgatgttaatgtgggacatttcaactacactgggggcaaaatcaatgttttgccatcaagattgcaaaaactatacaagcgcattaagcattatcagagaatgctggctaagaaaagacgggctaatggcaagttagctggccaaagcaataattacgtgcaagtgagaaccaaactgcaacgtgattatcgtaaagtagccaacattcaaaacgatcttttgcaaaaattcactacaaaattggttaataattatgatcaaatagtgattgaagacctagccgttaaacaaatgatgatgacgcacgtcgcttcaaaaggcatgcagagatcattattcagtaagtttagacagatattgacttataaatgtgagtggtatggcaaagaattaatcttggctgataaaacatatccatcaacccaaagatgtgctaattgtggttatgttaaaaaaggtgatgaaaaaatcactttgcaaggcaaccaaaaacatcacactaagcacaatgagtatatttgttatgaatgcggttatactaatgatcgtgatgataatgcagtgttaaatcttttagctttagcaaaataatgaaaacggggctggctaagcccttaagctgcaagagttagtcaatgcgattactcctagattggaatattggaatactaatgatgacagcagtaaataaagcgaagaaaggaaggactatatttctttctgatatgtaaaaaaatatacattcttctacatatttctatgttttatatagcagtgttgatatgctttttagaccaaaatatacaattgatacgatttacaatctggacccccagaagttgaatgaaatggacattaaggcggttttttcagacctagataatacattgctcgcctggaataaatttgaaactgccaaagaaatggataattttaatcaaaagttagccaaggcgggaatcactctcgtggtcatttctaacaataatgctcaaagagtgggcaaggtacttgatccttaccatatcgaatttgtcgctaagtcacgtaagccattgccatttgcgatcaccaagaagcgcgaagcaatgcatttgcaaaaagatcaggttatgatggttggcgaccaactaatcactgacatgcaagcagggaatttggccggcgtgaagactgttctagttaagccattagttgaaactgataagtggaatacgagaatcaatcgtttctttgaaaaaattatctttttcttcctgggtttatcacatcgagtaacatttaagaaggagctatcaaatggatgaggatattatttgtatcggctgcggtgccaagctgcaatccgatgatcctgaaaaagcaggttatctgccaaaaagtgcactagataaggcaaagcaagaagaaaatgcggatgtttattgtcaacgttgcttcagattgcgccattataacgaaatcatgccagttgatttgaacaacgatgattttttagctttgcttaactctttaggacaaaagaaagctttaattgttaatgtagttgacttatttgatttttcaaattctttgctatcatcattgaagcgttttgttggaaataatgattttattttagttggtaataaatttgatctatttcctaaaaactctaagcaaagtaagattaaggattggatgagacaagaagctaaccgaatggggctttatcctaaggaaatcttcttggtttcagctaaaaagaagttgaacttggaagatttgatcgcttatattaataagcaatcgcaagacaaagatgtctattttgtagggacaactaatgttggtaagtcaactttaatcaatgccattattgacatgatgggtgatattcaagacctgatcaccgcttcacgctttcctggaactactttagacaaaattgaaattcctctagaaaatggtcactttttgattgatacgcccgggatcatgaccgagaatcaattggctacgcacttaaatgctaaggatttggagctggtctcacctaagaagcctttaaagccagctacttaccaattattgcctggtaatactttattcttagctggtttgggacggattgattatctcaagggcgaatcgactagctttactgtttacgttgctcgtggaatgtatattcaccgtactaagacagctaatgcggatgacttttataaaaagcataaaggtgaattgttatccccaccagctgcagatgatgaaatggcaccactaaagggtcaagaatttagaacggaatataagagtgaccttttatttggtggaattggttttgtgactgtacccaagggatgcgttgttaagacttacacaccagatgggattggtttaggtattcgtcgtgcattgatttagaggtttgcatatggttaatccaaaatgtattgaaaaaatgccaactgctaaagttgaagcagaattggaacaagaacaaggtaaaggtcgtcagattgggattatgggtggtacctttaatccggtgcatattgcgcacttggtagcggcagagcaagcaatgactaagttgaagctggatgaggtctggtttattccggataatattccaccgcataaaaatgctccgctgacttctgctaaagatcgggcaacgatgcttgatttagctacgcgcgataatcctaactttagggtaaaactattggaattgttccgaggcggcgtttcttatactgtggatactatgcgttatctcaaggaaaaagcacctcagaatgactattatttgattatgggcagtgatcaggttaacagtttccatacttggaaggaagctccgaccctggctaaactagtaacattggtcggaattcgtcgtccaggttatccacaagatccgcaatatcccatgatttgggttgacgcaccagatattcgcctaagttcgactgctattcgtcgcagtgtcgcaactggcacttcaattcgttacttggtaccagaagccgtcagagaatatattgaagaaaaggggctttaccttgacgaaactaatttttaaaaatacttattcaccattctctagtgaacaaattgttgctaaagaaaaggcaaacatgaagaaaaaacgttttgaacattgtgttcgtgttagtgaaactgcacgtaagttggctaagttaaatggatatgatgaagaaaaagcagccttagctggctttgttcatgattatgccaagcaggtaccggtagaagagtatcgtaaggtaattaaggaacaggattttgatccagatttgcttaattggaatcgggccatctggcatggcattgtggggattttctttattgaacgtgatttaaaaattagggatcctgagattttaactgccgtacgtcgtcatacgactggtgatactaagatgactacattagataaaattatctttgtagctgattttattgaacccggacgagattttccaggagttgaagaagcgcgcaaagttgcttatgctagtcttgatgaaggggtaggctatgaattgcagcacaccttagagtttttaattgaaaataaaaataaagtatatcctcgtactttagaagcatacaatgtatggggaattaagtaataaaaaggagaaaaatattgactagtcaagaaattttagattttactacccaagcaattagtgaccgtcatggtgaagatactgaagcttacgatatgcgtggaatcagtattttagctgattactatgttattaccagtgcaggctctaatcgtcaattacatgcgatcgttaactcaattgttgatgcggctcacgaaaacaactacactgactaccgtattgaaggtaccagagattctaactggcttttgctcgatttaggtgatgttgtagtcaacgtctttactaaggaagcacgtgaattttataacttggaaaagctatgggctaacggtaagcaagttgaattgaaggaagattaagcaatgagtgttgttgggattattgcggaatttaatcctttccatagtggacatgagttcttgctaaatcaagcacgcttggttgctggtaatgatccaattgtggtgctcatgtctggtaactacgtgcaacgtggtgagatggcgattatgagcaagtgggagcgggctaaggtggctttgcaatctggtgccgatttggtatttgaaacaccattttcaacggcagtagaaccagctgatctttttgctctcggaaacattgaacaacttgctaaattaggcgtaactgatttagtctttggtgtagaagatgctaacctgaattttgcttatttgggtaaaagaattgcggaaattccccagaatcacatggattttagagattatagccaaacttattcaacacaatacaaccaaatggtagcgcatgaagtaggctatgaagttaatcagccaaatgctattttggggttagcgtattcagtagctaatcataatttaggttcaccattaaatctgcatccggtcaaccgaattggagcaggacatgatgaccttttacaaagagaaaaagttgtccaaagtgctagtgcgattcgaaatttattattgcatggtgaagatacaaaaaatttaaagtattggatgcctaaagcagaagcaatggtgttagctgagcagaaaatttatcctaattggaatttgctatatccatttttgaagtatcaaattgaatcatcttcagttgaagaattgcgtcatatttatcaaatgagcgaagggcttgaatataagatgaaacaagagattcatttagcccgcgattttacagaatttttgcggcatatcaagtccaagcgttatacttattcccgtttgcgccgtttgagcttatatactttgcttaatgtcactcaggatgatatattggctagctttaatcatgagtctttgatgctcttaggctttagtaaggtaggtcgcaaatatttaaagcaacagcgcaaggaatttcagacagaaatcgtctctaaagttgataaaagaagtgctaagaacggctctttagctttacaagttagggtagaccgtttatttgaacaaataatgggcgttgatcaaaactttggtcgacggccaatcgaggtgtaaaaatgttagaacttagtttttctaggattcaaaattccaaggaaccattaactcacattgaacgtgatttggaaatgcgtccagaattttttaagcgtagtaaagatctactaattgatgcgaaaaatgtaaaagtgagcggtgacttgttctatcaagaaccatttgtgactggcagttttcatgtggccgctgatctggttgtgccatcaagcagaagccttaagccggtaaactatcatgaagattttacttttactgaaaactaccttgatcgtaagccaaccaaggaagaattggaagaaaacgatactattgtacaagttgagaatgaccaaattgacttgcaaacagcggtagaagataatattttactccatattccaactactattttgactcctgaagaaaaagaaaagaatattttcccagagggtcaaggttgggaagttgtttctgaaacctcttttgaagaaggcaagaagaaccaagttaacccagcttttgctaaattgaaggtcttgcttgatgggcaagataatgataaggacaataaaaataagtaataaatgtaattgaaaaatatggtggacaatcaaagaaaatttttactttgattgttttttaatcttgtgttagaagcacttttaaagtatcctttaattataaaagcattttttaattaatttattagtattagaaaaccaaattgatctacgaggaaatgaattaacatggcaaaaattctaattattgaagatgaaaagaacttatctcgctttgtcgagcttgaattgcaacatgaaaattacgagactgttgttgagaataatggtcgtaagggattagaagatgcattgagtcaagactttgatgctatcttgcttgacttgatgttacctgatttaaatgggttggaaattgcacgtcgtgttcgtcaagttaagactacgccaattatcatgatgactgcacgtgattcagtgatcgaccgtgtttctggtttggatcatggcgctgacgattatattgttaagccttttgcaattgaagaacttttagctcgtcttcgcgcagtgttacgtcgcgttaaaatcgaaaaggacgcatcaaaggttactgttgctaagcaaaagattgtaaaatttaaagatttgacaattgaaactgctaaccgaattgtgcaccgtggtgatggcaaggcaatcgatttaactaaacgcgaatacaacttattaatgaccttgattgaaaataagaacaacgtagttagtcgtgatcaattattaaacaagatctggggtccagaatctaatatcgaaactaacgtagttgaagtttatgtacgttatttacgtaataagattgacgctccaggtcaaccatcttacattaagacggttcgtggtaccggttatatggtaagagatgaagatgatgatcaagaataaagacgaggaaaaagaggccaagcactcatccctaattgtgcgatgggttagtatcgttgcattaacgattacggtctcttttgtcatattttcagttgttgcctatcaaattgttagtcatcaatcgatggaacagcaacaagagacatctaataatgtagttaccacgatggaccggacattaagttctattcaagatgagctagagatctcaaatgtaattcctgctctgtcaccgtctaccaggcgtattttgaggggcggtcctgctattagcaaaaaagatacagagaataaagcatttagtgatagcctgatttcatcgatttcgaatccagatattaatgtagcagtttacaacaaacatgatgaaattgtttttactaatggtaattctgcacctaagctaaaagaatttgccggcaaccaacttgaagaagtagtaaaccgaaaaaaaggcaaaatgcttttaacctaccagaaaatctattctgaggtaaatggcaaattaactggctatgtagtggtttctaatagtatgacttattacaatagcttgatgagtaatttgcttcattggatggtaattatttcactgattgcaataattatcttcattgcaatttcttatattttggttgttaatgtagttcggccaattaagacgatgtctaaggtggctaaggaagttaatgctgatcctaatagtgaggctagaattaaggaactacatcgagatgatgagttagaagaattagctacttcgattaatcaaatgctagaccggatgcaaggttacattgagcaacaaaagcaatttgttggtgatgtctcacatgaattaaggacaccagtggcagtaattgaagggcatttgaacctgcttgaaagatggggcaaggatgatccgcagattttggatgaatcaattaaggcttcgttgcaagaagctgatcggatgaaacatttaattcaggaaatgcttgatttaactcgagccgagcaaatcgatgttcaatatccgtatgaagtaagtgatgttaatgaaatcatccgcagagtggtcgctgatatggcaatggttcatcctgacttcaagattcagctggatgaggatgatttacctgatgatacagagattcaaatgtatcacggtcatttggaacagttgctagtaattttgatcgataatgggattaaatattcgactgatcgcaagcagattaatgtttcagctggtgtaactaagaagaatgttaatattattgtgcaagactttggtgaggggatttctgaagaagatcaaaagaaaatcttcaatcgcttctatcgtgtggataaggctagaacccgtgaaaaaggtggcaatggtttaggtctatcgattgcacaaaaattagttgctagttataacggaacaattagtgttgaatctgttgagggtcagggcagccagtttaaattgaagttccctcggttgactaagaaaaaagccgctaagttaagaaaattaaatgagaagaaacaaatgcctaagagcaatcttgaggcataaacaaaatcctattaaatcaaggtttgggtaccaagatttaataggactttttttctctagaggcttaggtattagaaaataagaaataaaatgcttcgaaaataattataattgttcccggatttaaaattgaagtgcaacactaagtgttaaacaaaaaggccatgaagacctaaacttgaagtgacgaaaaatcaagaaaggaagatcttcatgaccaattcaaattctagcatttctaagcactatcatcaattaaccagcgtacaacgtggacaaattcaagcaatgctggattccggcataacttcccgtactgttatcgctcaagaagttggctgccataagtcgacaatcagtcgcgaaatcaaacgcggaagcgtcctgcaaagagacagcagctatttattgtatgagcactattacgctgatactgcacagatttattatgagaagcgtcgcaaaaactgctatcagcgcaatccattgaagcattatgctgtctttttgagaatgctctccagacgctttaaagctaaatttgatgccaccagcatcgatgagttcgttggtgaattccaaaggactatgccaggctacccttgtcccagcacaccaaccgtctatcgctatattgatcagggcttgctggacataagcaatattgatctgcctatgaagctcaaaagacgcaggaacaagcgtcatcacagccatggcggtcacgctttgcacaagaagcatcttggcaattccattgaacagcgtcctaaggaggttgaagacagaaaagctccgctgcactgggaaggagatctggttaaaggcgtcagacgcaagaatcagcctgctttaatgactttgactgaaagaaccacacgctttgaagtagttatcaagattcctgactatcgggcaagcacatgccaaaggctgcttcaaaaggagattgacagacatcctgcctggtttaaatcaatcacgtttgacaatggctctgagtttgcggatatgaccaagatcaagggctgccagatttactttgctcacccatattctccatgggaaaggggcaccaatgagaactgcaatggtcttttgcgtcaattcttccctaagggcaagagcatgaaagacaagtcaaaagcttatgttcaacaggcaactgatgccattaaccacaaatatcgccgaatcctccaatatcacacagcagaggaactcttcaagcaatatatctcttcataacctaactgttgcacttaatttgacaattcaggaattataattgttattaatttaagcgatttaattagctaaaaatatttaaacttaagtcatgtggtaataagaaactgtcaaatcttttgtgtaaatagatctttctcgtaaattgattttttaattatttatttaatcaaagtaggattctaaggtgtcctgaacctgaccaaagcctttatgaattcgattgaaataacggtcattgtagctcattgcctgaatgccaataaaagcatcaagcgactgttcagttggaaactctgccttaggcttagctttgcgcttgatcacattgttaaatgattcaatcatgttagtcgaataaattgaagctctgatctgcttgggatagttataaaagaccagcagatctggttctatgtctttcaagcttctgataacatggctgtaaaccttgccccatttggtatagaagtcatgcaggacagctgtggcttcttctttgtttgtctgttgatgcacctgtttgaattcgttcatgatcttttcacgatcgtcgacgcgtactttagcgcagatattgcgcatgacatgaaccaaacagcgttgaaaatgagctttaggataagtcctggccaaggctgttttcatgccaacaacaccatcagaaagaaaaagctcaacttgctttaagcctcgggatttcatgttttgaagcatatctgtccagacttcaatgttctcgctaggcgcaatgcagtagtcaatgacctccttgtgcccattaggcttgatgccaatggcaatatagactgcttcacgctcaaatgtttctcggcgcaaaggaaggtatgtcgcatccaaatagacgcagaaaaacttgtcgcttagcttgcgtttgtggtaagcctcaacctttggaatcatctgcttggaaatatttgatacctgagctggactgtaatggctgccatacatcttttcaattagatcggctatttccctggtggtcacgcccttggagtaaagcttgataatcatgctttccaagatatccgagtgctgcttgtagccaggcagcgtgtgctgatgaaattgaccgttgcgatcccgaggcacttgcacttcaattgggccaaattgcgtatcaactttgcggaaataagcaccatttctagagttgccagtattccagccatttctggcatagggatcatagcccagaaaggcagtcaattcagcttctaacaagttattaacagcctgttgtagctctttgcgcaataaatcatttattttgtctggattgaatagagcttgagcaaaatctttggtaaaatcattcatgaaggagttcttctttctgtatgtgtttttttgttcaaaccaatcatacgagaaaggaactcctttttctaatgtttaaagaaataaatttaaggaatcattcatccttacacaaactattttacagtctcggtaataagtcaaatgaaaggcgatgatatttgttctttttgatcataaatttgagtatatgaaactaagccttggtaaaggttgatttttttaatgttaaacttttgtttacttttaaatttagaccaatttttgaaattaagacctcggtgtcctgtacagtttgtcatctttgagcaatttaaagataactcgtactaattttcttgcagttaatgtgcaagcacgtttatgcggcgagtagacagcttcatcatacttcttttggtaatattttttgaaaacaggatcatgtaatcttgctagattggcagcttcaatcaagtaatatcttagatatctgtttccagtcctggccattggagtatgttcgttgctgtgatctcccgattgatattgattccaggttaggccggcatacttagccagctgttcttctttatcaaagcgatcgatacttccgatctcagcgataataccagctgtataggttttgccaataccgggaattgattccagaattttgctttctggtaatgcatcaacgatacgatcaattgctttttctagatctttaatagattcattaaagctttgaatcatgttgtaatgaacagaaagcactgcatcaattgaatcagtcattactttgcctaagcgatatgaacctctaacagctttcttaattgctttagccaaggtatctggatcggaaaagcgtcctctgcctttaacctgtaagtaagaaattaagtcttcggtaggcatatccgcgatctcatccagagttttactatcggttacaatagacatcattgtagcaccgaaaagaggagtattaatcttatctttatcgacagtgattagtttattaacccgataatataaagcttcaatgaagtgctgtttggtacgagtcagttcttgaactaattcatatctggtacgcgttaaacgctctaaagcaagatagttgtcttgtctggcaatgcttactcgataatgtccaaagcttagatacaaagcaatgtaataagcatcgagaggatcagttttactttcttcaaagactttatgaaacctgctggtttctttggggttaattacatcagtctctacattgagcttttgtaaatcttcgtcattttggaaaaagtaagcaggatgaaaactgtaaatagatgtagcttccatgccaataatgatttgatcatagtgtttattttgagctagatctaaaatttgttttttcagttcactagcaccataaagatcattgacaaagctatcgttaattaagcgtttgttttgatcttctgaatcaagtgcaacgacctgtaaatctttagaactaacatcaataccgacaaataatttcattggaaatggcctcctttctttcaaatttctgatcatagattttgatcttcacatgttaacccctaattacagttcttaagttcaatctcgccagtataagtattcactggttgcttctttgaaagctgcacctaatcccaattgctcaaggactagcaaaaagaagcaatcaatacagcatgtgagttagagcataaaggaactgtctgggtggcagacttataaagcagacaaaactgcaggaggtgataacctagaccagttgaccaaagccaatgacaattagaggctaacatgtgaagatcaaaaagcaaatactaatttgattaattatcacaatatgactaattacaatttatataatacgagggatgtgacataatgaaagaacgcattttttcaaggaaattctggcagaaagtttttaactatcaattgattatctggtttctcttgatgattagttatactttttctcagcggaataatcatttttattttataggggatttgttcaatctagcttttagtacggcgatcatgggattgaacttttacgtgcaatttaaaaaggattccagcaagactaatactcaaattgttcgctggctgaccatagtaatttttcctttcaatttttgccaaatttggcatatcactgggaattttttgctaaaaaacctgccggctatcgagattctattagtattactgctatgggcggtttatattttcttgctagttccaattgcagttgtacatgttggaccgattaaaaattggtttttacgcttgctaactatttactttcttgatattcagtacggtgatgcacaaaatttagcaataaatccagattttcgctggcttcattcacttacctatcaaggtgtaatcgcagctattgctttattaacgatgacttgtttcttagttaaagcttggggctatcacttcaatccaaacttaaaatttattaaaagtccaagctttcagaagaagatcttgctggctttattgatcatggcaaccattgatttgttttacaatgagtttatcaactatgataaagcaatttggacagtattctttggtgttgacattggttcatttaaattctcaattcctaatttaactgcagccattgagcccggaattttggaagaaaccgaacgctatttattgatcgtaatttttttagctggttttaatagatttccaaagtatcgcatccctgttgcaatctatggttcagcaattttgtttggccttagtcatttaagtaatttttgctggcatggagaaagttttactgcaacaattgcacaagttattggcgtaatggggagcgcctttatctgggcagaattgtatctctatacaggaaaactatggttgccgatgatctatcactttttaatggattatatttctgatttgcaatctggttggaattctgctggctggtcttggaatggcgaaatcactgattatatttatactgtattaattgttggcgttccattgctattctcaattttgatgcttttcggtaaaagaaggcaagtaatggaagataatgcagatttgattttgaatctaaacggtaggcaaagcatgatttatcagtgacttatattaaagggactataatgtatatgcaagggtaaaataattaagagaggtcataaattatgaaacttaagagaattgtattaagtattgtggctggaactgcgctttttgttcctgcagctttagcgggtcaaaatcaattaacaccggtagttcgggcaagtactctgaagaataagattacaactgttaagagctataccaatccaactttgtataataagaatggtaaagagctaggtagccaagatcggataaattttaagaaaccgatcaatttttatggtcaaccaattgttattcagggacccagggtcagtgcttttattaatcttaatgggatgccacaagctattgttaatggtgaaacctatgcagatttaggtgatggtggttatgtcaacatgaaatcggttggtagctataactggaataataatgagatcggaattattaaaaacacctatatttacaatagcaagggtaatcgtttatcaacttatcgcggtggcaaggcttatttaactaaaggtagcaagattaaatatgctggtaaaagttggactacttatcctgattcatattttaatttaggtgatgggacgtatttaaagtctaataacgttaataccatgaatggcaaaggcgttttgaagctgaatgctaacactgctatttacaataagaatggtaagcgtattagctttaatggacaacaggtttttcctaaatactcaattataaattatgctggtaagcgtcgcactaagacacaaactgacgattactattacacaaacttaagtggtagtaaatcatatgcaattaagaattataagattaaaggtcaagactattattacattggcagaggtgcttatatcaaggcaatgaatgttggtcgcatcaatggcaatccggcatttcgtgatggcggtgcaactacgattgttccgcagacagatttgtacatctataattctaaattaaagaaaactaagcaatccgttaagaaaggacaaaagattagagcggttgatccagttgttctaggcagtggtgatattgcccaactattttacagaattaagggaacatctaactatgtttcctggggtgattatagtgagtatggttttgaagatgatgagcacgtgggctactttaactttcgtgttagattaaatcctgttaaaactattgaaaatgccgctacacgggccgctgaagaatcagattaattgggagtgaagacgttatccatttggatagcgtttttattagattataggaagaggataaaagttcttggtgttgatgtttatacattgctgaatagattagtggtaatactacgatttacgattgttggagagttcgatgaaataggagacagctcaatgattaatgatttactttctgaaattagaatcgatttttggcgtgacatagggttaattattaatgatgaaaagctttttgatcgggtaactgctaattatggctatcatgaaattatgtatcaaaatattgatcattttttcatagaaactaatgacgatgatttcattaaacctaagcgaaaaacaacgtttgaagaaatttatgatttctattgcctagatcaacatataaaaaatgtgatgatgatcagtctgcaattgtttgaacaaagcttcaaagtagcccttgcagaaacagctcttattgagaatggtaaaaatttcaccagaaatcttaatccacgaacaattcatcaaaggcagtttctaaatgaaaaatatcaattaaaagatgggcgagtaattcaccgcggtgatgtgaaagcgcgcatgcggcatattaagcaaaactatcttgagccatatgagggatatactgaggctcatggtgaagcagggatcggactgattattaaagaaatgtcatttggtgttgcaacgaattatttctttttaatgcccatcaaagccaaaaagattgttttaacacgtgtgtttaaagaaaagataactctccgtcaatttgaagaatggctaaatgaaattagatattttcaaagacgagctgcccataacttctcgctgttgattatcaaggaaaaacggcaatttctgtataaattagtactgaataatttgcaccagctggcaaatcaagaaccatgtgaattagctgaggaaagaatcaacaagattgttcaagattatttgacgaagtatccaattgaaaaagattttttgaataaagtttttatggagaaaaaggattaagttgaagttttttataatgatctttcttcaaacaaatgaccataggaacttaaaattctagctaaatcgatccaagtaagactaattgttttggtattatcattgggatgcacaccaactaaattgttttcttccattgctgcttgatcgacaatcaggggaattttattactttgatcattgagcaggctaaatggggaaacagcccctgttttaacttgcagtttttcttctagttcagcttcagtagcgaaggttaaactagaggagagtaattcagctttagctttttgccaatcgatttttttatcttcgggtaacattagtagataataatttttggcgttacgggttttaataaaaagagttttacatttagcaaaatcttcatcttctaagtatttatctgcctttttagttgtaaaaactgctggatgagagaatacttgatagttaatatcatgatcatctaaaagttgtaatatttcttgagtatgcatattttcctcctaataaaaaagtcaggattttcctcctgactgataactatttacgcttttgcttacctttattacggttacgtaagtcttggtgtagttctttcttagcttcagttgtagccttgctttgaccgctattggagttaaacaaagcatccactttttctttagtaacaacagtttcaattggcttatcttttaattcatcggcaatatgcttcttaacactaggtgtaaggacaaaggtaacgattacttgttggacaatcattactaagttaccagcagcccagtaaagagctaaggcaccagagaaggataaactgaagaacaaagtcataattgggttaacaatcatcattgattgcatggtcttcttttgttcttctggaataccaattagtgagatataaccttgaataacggtaaagacagtcgcaataatggctaaaacaacagatttggaacttagagaaataccaaagaatttggattgtgccaattgaggtgaatagaataccgcttgataaattccccacataattggtaactgaataattaatggcaagcagcccattccaccagttaatgaaacttggtttttagagtaaagctctctttgccaagttgataaagtcatttgttggtcaggggtgatccccttgtgtctcattgcattttgaatcaacttcatttgcggttgcagacgagccattttttcctgttgacgtacactcttgttttgctgtactaacatcaatggcatcaagattacacgtacaactaccgtaataatcacgattccccaaccagcaccattatcgccgccaatcatgtgcgcggtttgaatcatgatattttgtaaaggtcggcctaaccattggtaaacccaaccgtaaataccgctgtgcggtgcaacatgtggatcagttgttgccccacaggcacttaatacaagagtagctactgctaataaagccagtactccagcgtatcttttaatttttttcatttaaataaatcaccacttaatttctatctaaaaatgtatgtctctaatataatacatgaaaatcatgcattttttctacacctggaaccgattcttgactaatattttgaatttgggcaaatccagatgcagtaggtagtttttcaataaagcggtcgattttatcactgtctgcttgtaaatagattgtaacggtaccatctgcattatttttaacagtgccaggaatacccatcttgttagctaatgccatggttgaccaacgaaagccaacgccttgaactaagcctgaacaaattaattttcttgtttccatttttatctcccttatttaaattaagttcaactttgattttagcatgatcaaaatagattatcagttataatagattttgaatacaaaaaggagaaaaatatgcaacaaattagttcagttaataatgcaacgattaagaaattagcgaagttaaagcaaaagaaataccgcgatgatgaaggcttatatttaattgaaggctttcacttatttgaagaagcacttaaagctggtaaaaaatatcagtatatcttaggtactgaagaagcacttgatcaagcagatagtgaatatgaagttgatttaagtgggaagaatgtcgtattaattaacaaagcgattgctcgccacttaagttcgactaagaattctcaagaaatttttatggtattaaaaattgatcaaccaaaagaatttccgtttaattatggcaagtgggtgctgcttgataacttggctgatcctggtaatgtggggacgattatcagaactgctgatgctgctggttttgatggggtagttctttcaccagagagtgctgacctgtataatcctaaaacgcaacgtgccatgcaaggaagtcaattccatatcgatttgattaagcgtgatctagctaatgtgatcaccgattttcaggatgcagctattccggtttatgcatcgctgcttgatcgttctgctaagcaattgcctgatttcgaaaaagtgccacaacttgccttaattattgggaacgaggcgcatggcataagcaaaaccattgcttctttggctgatgaaaagctctatattccaattaaaggacaagctgaatcactcaatgccgctgtcgcagccgggattatgatttatcgcttcgcttagcacttgtaattagtaagcggatttactataataatgttagtaatactgaaaaatattttatataatattatttttacagggattatataattatggagggacttacgatgcaagaagttaaagaaaaaaaggatgcagctccttgtaaaccagaagattatgaattgtgctgtcactttgttggtgcttttaagattattggcaaaaagtggaatggtttaattattagttcactttgtgatacccaagatatgcgttttaaagatttagcacgaacgattgaggcatgtagtgatcgagtactcgttgaacgtttgaaggaactagaaaaagaagatatcgtcaagcgtagtgttgatcaaaataccggcatcatttcatatggtttaactaaaaaaggtgctgaacttaagccagtttttgaccaagtacataattgggctgacaaatgggcttagggtattgacattaagtaagaaaaaaagtatattacttaatgtaagttgcttatttaaaataagacaagatgaaaggagtacgaaaatggaatttttaagtataagaaatgttaatactgactgttgttcttgtgtatctaacattgcttttaatactcaagaattcagtttgcgtatgcctaaatagctttaattagaaaataaggagatttacgtcaactgaagtagcgtagatctttttttattgtttaaagagacctatgagagtgggtctcttttttgtgtgattgggggatttttaatgaattggacaattatccaacaagccttgcctgtgtttgctcggggatttgagctaacgttatggctttcactagttggcattgtgggctcaattattgtggggattattgtcagtctggtgcaatactttaaggtgcctgtattaagccaaattttgacagtatatgttgaattagctagaaatacaccgcttttaattcaacttttctttttatattatgcctttccagtaattggcttaaaaatgtccgctgaggtctgcagcatcattggcttaatctttttaggtggagcatatatggctgaaggctttaccggtggttttaatggcgtaagccctagtcagattaatagcggtaaagcattaggaatgaacaacttacaattagctcgctatgtggtttttccacaaggatttagcctaagcatgccggctttaaccgccaatattatttttttaattaaggaaacttcgattttttcagtaattgcaattccggagttaactaatacagcccttgacttgattgggatgtattaccattcaaatgaatatttattgatgctggtaattgcttatgcgattattttgattccaattattttattattaacttggcttgagaggagagtacggtatgcttcattcggggattaatgttttgtttgaaggaagtaactttgcccgtttgatggcagggctatggacctcgatttggattgcagctttgtcactagtaattggcttggctgtaggaacaatttttggtattttgagaaccttaaaaaatcgtccattgcgttttgttttgcggttgtacttagaattcttcagaattgtgccaaccgtagttttactgtatttggtttattatattttgccaagaagcttgcacgtcaattggccagctacttggatggcggtattagctttctcaatgtgggtagctgctgagtttagcgatattgttcgtggtgcattggaatcagtacccaaaacgcagcgtgaatctggcctagcactgggtctaaatcgcctgcaactgttccgttatgtcttgttgcctcaagcagttaagttagaactaccagcaacaatcaacttggctactagagtaattaagaccacttctttattaatgattatcaatatcatggaagtaatcaatgtcggtcaacaaatcattgaagcaaataatcaacaatatccagctggtgtgttttgggtatatggctttatctttatcttgtattttattttggattatcccttgtctgcatgggcaaaacgattaactgctaagaattaggtgaatgaaatgacagaagaagttttaagagtagagcatttaaataaattttatggcaagcatcaaactttgtttgatatcaactttagcttaaataaaggcgaggtattgaccttattgggaccttctggttcaggaaaaagtactttgctgagaacggtgaatgggcttgaagaatatgagggtggcgcaatttattttcacggtaaaaaaataaatcctagtccgaaggaatggcaattgttgcgccaaaagattgggatggtctttcaaagttatgacttatttcccaacttatccgtgatggaaaatattttattggcaccggtaaaagttcaaaaacgtgatgaagctgaagttaaacaagaagcagttaagttattagagcaagtcggtttagctaattatgcaaaagtatatccgcgtgaattatcagctggacaaaagcaaagaattgcgattgtgcgtgctttgattatgcatcccgaagtaatgctctttgatgagattactgcttcgcttgaccctgaaatggttcgcggcgtgctagatatcatgcaaagattatctgataacgaacatatgacgatgatcattgttacgcatgagatgaacttcgctgcgagaattgccgataaggtgctatttttagaagacggaaaaattttggaagaaacaccaggcaaagaattctttactaaacctcagactaagcgggcacaagaatttttagagagtatggatttttaggtgtgaatgatggcaaaaaagatttttaattggatcatggctgtcctctttgcggtagttgtggtaattgctggttattttggaattacgcgaccaggaattaacggcactgcttcaggcgacagatggaataatgaaaataatgtatcttcaattaaacgtcgtggctatttaagagtggctgtctttggcgatctaccgccttatggctgggttaattcacaaggtaagcgtgttggctatgacgtgcgcctagctcgcagagtggcgaaagatttgggcgtaaaacctaagtttattcaagttaatgccaataattgaattgataccttgaattctaataaggctgatattgttttggctaacttcactttgacaccagagcgtaaaagcgtggctagttggactaagccttatatgaaagtatcggttggggtgatttcccctaagtcagctccgataactagtccaaaacaattgaagggaaaaagcgtgatcgttactaaagggacgacagcagagaactattttactaaacaaaaaggcgtaaacttgcttaagtttgactctaaaactcagcagtttaacgcgattaaaaatggccgtggtgcagcttgggccgatgataattcttatctgtatgcttgggttaagcgaaatcctaagtttactgtcggcattaagacgattggacctaaccagtatatttctggtgcggtaaagaagggcaataagtccttacaaaaatggatggatcgtgaaattaccaaattgaatcgcgaaagcttttttacttacgattataataaagaattgaagccatactttggtaaggaaattaggagactgtcaagaagtttgtgtaaataatctctctcgttgattgacttttttatttatcttttaatcaaaataggattctagggtgtctcgaacttgcccaaatcctttatgaatcctgttaaagtaacggtcattgtaatccattgcctgaactccaataaaggtgtcaagcgactgctcagttggaaattctgttttaggcttggttttccgcttaagcctgttgttaaaggattcaatcatgttagttgagtaaattgaagctctaatagctggcggatagttgtaaaaggttaacagatcaggctcaacctgtctaagatctctaactacgtttttgtaggctttttcccagttttgatagaattcatgcagcacctgtacagccatttctttgtttgactgagtatgaatctgcttgaattcatccagtgcttttttcgatcgtcaacccgcattttggcactgatattacgcatgacgtgtaccaagcagcgttgaaaatgcgctttaggataggactggcagatagcctctttcatgccaactactccgtcagacaagaagagctctacctgttcaaggccgcgactcttgaagcctttgatcattccgttattaatattgcatgattttccaatagctttggttttattcatgatctttttaattggaacagttgacttaatgtcttggactggataccagattctaatttcggagtctgtttctgaaagtgagttatcaaagatttctggagcagttggcctgattagttcaattcaaaaaacatttggaccaggtatagcagctattattgttaacctctttaactatctcggtggcttcatgctagattcgatcagttttggctatttgacttatgttgttaaaggtattgagactacaaataacgagaacaatgataaaaaaaagaagagtatacagcaaaccttatcacaaggtttaaaatttgttttgaaagaacatgatatcaaatggttaattattagttttcttgctgccaatgttggctttcaagtagtaataccgatgttaactttcttattaaaagtacaaacacgtgcttcaataaatgaaattagtatattttttactatctcatcagttgctagtatactgggtaactttgtttatctacactttagtaaaaaaataaagctaggcactcaattaatagttattggattaattattactgtaggattcactattatgctggccattaaatctttattaatatttaccatgggatatgcaatagtatcatttggtagtgtatgggctcaagctaatttctttaccattattcaatctaagacacctgaccaatataaaggcatggtaactgctacttcaacgtctctgacaagaattacaggtccattaatggcaacgctaagtggtatactagtaagaatatctccttccttaatctttttcgtagctattgtatgcttagttttatctgtattaataactctgattagtggtttacagcaattagataagctagccaattaaaacgaaatcataatccatatacagattacttatgtaaccgtaaattctgatcttataggtggaacataagctaaagaaaagaagattatgagatggaatagctactagaatgttgtgttgttttataaatttaaaaataagtgcagtcttctttatatctatttgtgagagatctttataaataaaaaacaaattattttttatgaaatatttatcttcctaaaattcaaaaaatatgagatataaacagtatctttacaaaaagcttgcaagaaacaggtaaaagaaatatcatattaattaattactgagatcaagactagtagcagatattttttctgaacagagagtcttctttcaaaagctgcaagagaagatagaaagaacgctgtgaatttcatcttgggagtaggatctaatcaattccggtatttcaccgttaacgaaaacttaagtgtgggcgttgctacgtccaaactagggtggtaccgcgatgcttcgtccctattggggacggggcttttttgttttgaaaggaaagatttaatggacttatttgataagttaaaagagctccatgaagaagggcttaagcaaatcaacaaggctaaagacgaaaaaactttgaatgatgtcagagttgaacttgttggtcgtaagggcgaattaactaagattttgcactcaatgcgtgaagttgcgccagaaaatagacgtgaagttggtcaaaaggttaacgaattacgtgacttgtttaatgctcaattagatgaagctaaagaaaacattgttcatgcaatgttagttaagaagcttgaagatgaaaagattgatgttactttgccaggtcgtgaagcacatcttggttcaaagcacccaatcaacattattttagatgatcttgaaagctactttattggtatgggctatcaagtagttcaaggtccagaaattgaaactgatcactactgctttgaaatgatgaatatccctaaggatcacccagctcgtgacatgcaagctactttctacattgatgatgaagatttgcttagaagtcagacctcaggtgatcaagctagagtcctagaaaagcacgacttctcaaagggtccacttaagatggtgggaccaggtaaggtataccgccgtgatgacgatgatgcgactcactcacaccaattcatgcaaatggaaggtttggttattgacaagaacgtaactatgagtgatttaaagggtactttggaattaattgccaagcacgtttttggccaagatcgcgaaacccgtcttcgtccaagttacttcccattcactgaaccatcagttgaaatggatgtatcttgctttaactgtaatggtaaaggctgccctatttgtaagtacactggctggattgaagtattaggtgctggtatggttcaccctaatgttttggaaaatgcaggtgttgactcaagcgtttacggcggttttgccttcggtgttggtcttgatcgtttcgctattttgaaatacggtatcgatgatattcgtgacttctacaccaatgacgtacgtttcttagaacaattccgtaaggaggaaagataattaatgttagtttcatacaattggctaaaatattttcttgatttagatggtcaaaatccatacgaattagcagaagaaattactcgtagcggggttgaaattcctgaccgtattcatccaatggatggcttgaagaagttagttgtcggccgtgtccttgattgtgaaggcgttgaaggtactcacttgcacttaactcacgttgatgttggtgaaaacgaacctttgcaaattgtctgtggtgcacctaatgtagctgcaggtgaagatgtgattgttgctcttcatggcgctcgtattgctggcaatgaaaagattaagaagggcaaaatccgtggcatggaaagttacggcatgatctgtggtttacaagaaatcggctttagcgatagcgtggtaccacaagaatttgtcgatggtatttacgtattcccagcagatgccgaagttaaacctggtcaagatgtatatgaagcacttggcatggatgattacattttgaacttcgacattactcctaaccgtgctgatactttaggcatggaaggtgccgcttatgaagtcggtgctattatcgaccaaaagccaaaggttgaagaaaaggttgtcttaaaagaagatggtccagcctggacagattcactcgatgttaaagttgatgaaaagcttacacctaagttttacttacgtaagctcgagaatattaagattcaagactcaccactttggttgcagcgtcgtctttggaatgcaggcattcgtccaattaacaatgtagttgacgttactaactatatcatgctgttaactggtcaaccaatgcatgcttatgacgctaagacttttgctaacggaaagtttgaagtaagacttgctaataagggtgagaagcttactttgcttaatgaaaaagaagttgaccttgaccctaaagatatcatcattaccgatggtaaaaagccagtaatgatggctggtgtcatgggtggacttgattcagaaatcacttcagaaactacagatgtcattcttgaatcagccatctttgatccaactttagtcagaaaggcagcacttcgtcacgctaaccggaccgaagcttcaagtcgctatgaaaaaggcgttaactgggatgccactgaaaaggcaattaacatggcagcgcttttacttagaaatgacgctgacgctactgttgatgaaggtattcttaaggcaactgaccaaaagcgtgaaccagttgtggttaaaactactgcttcatacctcaataaagtattgggcactaagttatcagttgatgaaattgtaaagatttttgaccgtctttgctttaaggtagatgttgatggtgataatttagctgtccatgtaccaaatagaagatgggatatttcaatcccagccgacttagttgaagaagtaggccggctttatggctatgacaaccttgaatctactcaacctgttttgccagaaactcatggtggctactcagaaaaagaagaaatgatgcgccgcatgaaggcaattgttgaaggacaaggcttgatggaagctatttcttactccttgacttcacctgaaaaggccgttcgttacactaaggatccaaaagaattagttgaagttaaatcaccacttaactcaagccgttctgcaatgcgtgagaatttgatgactggattggtagatgctgctagttacaactttgctagaaagcaaacacaattagctttatttgaacaaggcagaacttatgaccatgatggtggtaaattcaacgagcatgaacatttagcagctatttactctggcaatacttttgcggaaaattggcaacatttaacccaaaaggtagacttctactttgttaagggacagttaaccaatttgttcaatgcaattggtattgatcctgaaaaagtggtttatgaggctaaaggcattaaggggatgcacccaactagaactgcaggaatctacattgataagcaatatgttgggatgatcggaatgattgctcacgctgtaacgattgctgataaggcacttcgtggtagcgagctttatggctacgaaattgatctcgatacaattattccaatgttaactaagggcgtaactgcagtgcctgcacctaagttcccagcaattcaacgtgacctttcacttttagttgataagccagttactaaccaagaaattgaaaacgtcattaaatctaatgctggtaagtacttaactgaacttaaggtaatcgatgtttatgctggtgctcacattgatgttggtaagaagagtattgcttacaacttaaccttcttgaacagaaaagatactttaaccgacgatgttgtcaataacgcgatggacaagattgttgctgctcttgaaaatgatcttgcgattaaagttcgttaaaggttgacattattgacgtaaattaatattattgatcagtgcaagataaagaaaattaatttctgaggagttaaaaatatgcctgaaaaatcttatccaatgactgctgaaggtaaagaaaaacttcaagcagaattaaagaacttaaaattagttaagcgtccagaagttattgaacgtatcaaggttgcacgttctttcggtgacttgtcagaaaactccgaatacgatgcagctaaggatgaacaaagtcaccttgaggatagaattgctcaagttgaagaaatgcttaagtatgcacaagttgttgatgcagaaagcgttgatcctaacgtagtttcagttggtaaaacaattacctatactgaagttggtactgatgatccagaaacttacactattgtaggtagtgatgaatcagatccattgaatggcaagatttctaacgattcaccaattgctcaagctttattgggcaaaaagaagggtgaaaccgtatcaattaccactcctggtggcaagtttgacgttgtaattaacgaagttaaagcctaataataaaaagggagggtagctatgactatcttcctttttgtttttttgaaaggattttaaaatgagaacagttggtattattggcatgggccatgttggtgcaaccgttgcctatactttatttacgcacagtatggttgacgaactgattttaattgataaaaatgaagctaaagtaaatgctgaatacaatgacttgcatgatactttggctagaaatgatagctatgttaatgtgcgaaagcaagattgggacggcttagaagatgctgacattattattaccgcttttggtgatattgcggcttcagttaagacaggcgaccgctttggtgagtttgaattaaatgcaagaaatgccaaagaagttggggcagatattaaagaatcaggctttcacggcgttttgatcaatatttctaatccatgtgatgcaattacccaaattttgcaagaaacttctggtttaaagaagaatcgcgtctttggtactggtactttccttgatactgcaagagttcaaagaataattggtgaaaaacttggtcaagatccacgtaacgtagaaggtttcgttttaggtgaacatggttcttcacaatttacagcctggtcaacggtaagagttaacaacaagattgctttccaattgtttggtgatgaagaacaagaaaagattagtgaacaatcaaataagaattcctttattgtggctaagggaaagggctatactagctatgctattgccacttgtgctactcgtttagttcaagcagtctttagcgatgctcatctatattgtcctgtttcagtttataatcctgaatacaagacttatattggttatccagctattattggtcgcgacggcattgaggaagaaattgaattaaagcttacttctgaagaaaaagaaaagttgcaagctgctgcagataagatcaaagaacacttgaagcaattgaagaaataaaaaatagtcattataaaaaaataaggcgagaattacagtcattgtagttctcgtcttatttattgcttattttagttttacatcccaagcggcaatttgcttgttgccgtagtatttcttgtaaatttgcttggtctttttggtctggtatgctttaacaatttcttgataaatctttttatttttatccttagtgcgggcgcaaataatattgatccattgctcagagtctttgttcaatggttcgacaaagatagtttgcttgtcacctagatgtgcagggccagcaaagtcattgttgacgacagcggcatcaacatcatcgatcacgcggctagtttgttcagatgcaacttctttaattttgaagtggttaggattggcagtaatatctgcaacagagaccaatactttgcctttcttcaatttgatcaacccggcatttttcaaaacaaaaagtgctctcgattcattggtgggatcgctggggaccacaattgttgctccttcaggtagtgcatttaggctatgatattttttggaatataagcgaataggtgagatataggttttaccgattgcagtaattccgccatggttggctttgttccaggcgttgaggaaagcatagtgctggaaggcattcagatcaacgtcaccggatttaagtgccttgtcaggttggtcataaccatcaaaacttttagtggttaaaataatcccatatttctgtttgacggtttgagcaacgcttttccagattgcaatgtcacctttgctggcaccaacgattcctacgctaactttggtttgaccgttgctttttggcgtccaaaagaagctgaagtaaccagctacgataatcaataagctaacaatggtgccaataataatattccgctgtcttctttttctcatttttctttctctcatatgcaaaaaaagcacccatcctcaaaggacgagtgcttcgtgttaccacctttatttgccagctatttacataactgacctcaatagctatctaacaatagcttgcattgttaacgagagcaaccccgatactagctaaatatcactagtataatcattctgaatccatcttcattaagtagtttcttttacttctcaccaaccagtaattctctgtaagaaagctagctataattactctattcatcaagattttttaattattgctattaatttatcatctcgttttaattttgtcaaataaatttttttacttagttaaaaagttagtaacggaagaaatagtgagaaaaagtttatttttgtcgattaacaaagtagtaaatgagtgagacaaccgattcagccaacatcccaccggccatccagtacattgccatcatcattttgccggtaaaagtaaagtaggcagtaatggcgtaaacaattacccaaataattttccaaaataagttattcattcctgagcacattttgaagctcctttatttttgactagcaccagaactgctgtcaacttccatgccgcaaccttcggtatccattcctggcatccacacatcttcaggtttaatgcctctttctttagcaaaggcgtcggttaatgtcttcatatccattaacttgtatgtctttgggtgtttagggtcgaatacttcgatttgagccatcattccggcatcttcgtgttcaataatgtggcagtggtacatgaagactccagtttgtgggaattctacacgcaagcggacggtttcacctggtctgacaggaatggtgtctttgtaaccatattcatttggaaatggcttttcgccatcacgtgaaacgactgtaaagtgtgtgccgtgaatatggaatgggtgcaacataccgtgttccttagagttggtattagttacgtcccagtattcagcatgactaacttgttgcttcatatcgatccgctgcattgcgaattgcttgccgtttatcttgttgtgatcatccatagttactttacgaatcggcaaatcttcagcgatttcaggaatttctggtttgaataatgtatcaggaataacactgttgtcaggtgcaaacttgtgaattctaaattcaattagtttgaaatcatcagtataaaggttaacgacatcgccatcatggtaatccttgaagtcaactacaacttgaagccgttcaccaggtgttaccaagatcttagtcattttgattggatgaggcaaaaatgaatcgtcacctgcaatttgagtcataactaggtcatcatcaaagtgcaagcgccattcacgacggttagacccacctaagaatagtaaacgaatcttttgtgttgttacatcaacataagggcgaaccgtgccgttgattaatggtgtttcaccgaagacgcccattgcatcataatcagcgcgatagtcaagttgattatctttgtggaaagtacggtcttgcaaaataactggaaactcgtcaacgccatagtttttaggaattgggagtttagcttcgttttcatctgttactactacgcccatagctaatcccatccaaacttgggcagcggtggatggacatgggtgagcatgaagccatgttaaggcagctggttgattaacagtgaattcgatttgcttttcttcacctggataaacaggggcatgacagccaccatcagtaataggaccaggaacttccatgccatgccagtgataagttgttagttctggtaaactattttttaaggtaacgtgaactcgctggccacgttttaagaccatggttttacctaacaaaggagcgttataaccccaagtcttggtcttagctccaggcaatatttggctttcgctttcaattgattcaagagtgaaccagacatcagtatcagtttccttatccagtgcaagaactggagggacagctaatggctgagcttctacaccttgagggatgcttaatttcttgtagtggaagtggtttttgtcaaaatcttcatctttgataaagtaattagtgtatatcttatctgtcatcttattaaccccattcttttgacactaacttagcatgattttttaccgtcttcaaggcgcaagaacgctgttatttaaaggcttgcatgtctattataactatgtaatgaaaaatatttttactattttgtaatcacttatacttaggcggattatgttattttacaagatttgttgccttgctaggcttgcgtgtctccggtaaactaagcatgaagaggtgactagatgtataaaattattgcgtgtgacttagatgaaacgttgttgagcgcagatacgcatgtctcagtagaaaatagagaagcgattcaaaaagcagttgctcacggtgtaaaatttgttcctgcaactggacgaggctacgtttctgtccaaaatactttaaaggaaataggattagagcaggcagctaatgaatatgtgatttcattcaatggtgccagcattacagaaaataagaataatcgcgtgctgtattttgacggcttgcctaatgaaattgcggatcggttatatcggcatggggttgaactagatattgccatgcatgtttacactcaagatatggtatatacgtatcatatcgatgatgatgaacgtgcctatatgacgggacgacaccagtttaaagagattgaagataaagacttgtcatttttggaggggcagaaaattgccaaggtgctctatgagagtcttgataataattatttgcaccggatcgccgctgaattaggaccaattacgcaagaattggatatttcgtattcgtctaatcgctatttggaatttaaccgtaaaggtgtcaataaaggcgcgggactgatgaagctggctgagcaacttagggtgccgattgaagaaacaattgccattggtgataattttaatgacctgtcaatgattcaggctgctggtgtgggtgttggtgtagctaatgtcaatcctgctatgaaagagcaatgcgattacattactcaggctgataataatcatggtgcagttgccgaggcaattgatcattttatttttaacaattgaaaaaaataaaaaaataattgacatattaaaaatacatgatattattgtttacaataaataaaaaaatgagctttgataaggaaagtaacttaagaaatgatttgcagagagtcttcggttggtggaagaagataatgatgaattaagtgaaaatcacctttgagctgaaagtgcgatattagcattttcagggtccgccctctatagcggcgacgtatcgctgattttgatagaatcagccgcacgtgcatgaggtagaatttttgtgagtattattctacgaataaataggtggtaccgcgttgaagacgccctattagatcaattgatctagtagggcgtttttttattatcataagcttgttgttaattttttgacttatgggagagataaaaatgagaaaaacattgaagcacttatttggcacgactgtagtagcacttttaggtgtaagtactttatctgcatgttcatcaagcaaatctggtgctaaagcacctaaacaagaattgacctggatgactacctcagaaatccaaactatggatccttcaaagatggtagatacaactggtagtgaacaggcatctaatgtttttgaagggctcaatagactgaataaagcgggtaaagttgtatctggtgtggctactaaaactaatcagagtaaagatggtttgacctggacttttactttaagaaagaatgctaagtggtctaatggtgatccagtgaccgctgaagattttgtttattctttaagacggacacttgatcctaagacacaatcacaacagcaaaatgagtggtcaaatgtagttaatgcagatgatgttttagctgggaaaaaagctccgtcgactttaggtgttgaagctaagggtaaatatgaattggtagttcacttgaaacatcccgtaccgtattttaaagccttgtcagttggttggaatccgcaaaataaacacgtagtcgaaaagtttggcaaaaaatatggaactgcatctaagtatatggtttacaatggtccgtttgttcaaaaaggctggactggttcaagtcttaactggaagttagaaaagaatgatcaatattgggacaaagataaagttaaattgcagacggttaattatagtgtacaaaagacgccttcaactgattacaatctgtatcaggctaacaaattagatggtgcctatcttgatgttcaggcttcaaagagactgaagggtcaatctggttatacagtctataaactagatagaactgaatacttgactttcaatgtatccaagcatccagaactagctaatgtcgattttagaagagcagtttcaatggcacttaaccgagctcaattggctaaaacagttggtggtgctaataccgtagctcgaacttttgctggaccaaatgaatatgttgatggtaagaattttgaccagtatgttgaaagcaaaaatccagctaataagtatatgaattataaccctgcaggcgctaagaaactttatgatagagcattaaaagaattgggtaagaataagttggcctttaccttaatgggtgacgatgatgacgtttctaaaaaggttttagagtttgtgcaaagccagttagaagatacctttggcaaaaaagttgatgtaactgttagaagcatgccgaagactactagagttaagaaaatgctcaatggtgatttcgaggcagtctttactggattgacttcgggctatttagatcctaattcacaattgcacacaatgatgacaggacaaagttataacttcggtaaatggtctaacaaagattttgacaagtatatgaataattcagataaggaattaaatcctactaagcgattagaagatttgtataatgcagaacgtgttttaactgatcaacaaggattgacgccattattccatgatggtcaagcttggatggttcgaccaagtgttaaaaatgtagaattcttgggtggtaatttcagctttaaggatgcatctgtaagtaataattaggagaaaaataatgactaaaacagcttttgtaaattgtaatttattcgttggtaatgaagataatctagtagataatgcttggtttgtcgttgatgatgaaacaggtaaattgaccgatcaaggtaagggaaaatgcacagcagattttgacaaacaagttgaccttaaagggaaatatgtgatgagcggtttgattaattcacatactcacatggggcttgattctgacttgaagaaaaaatttccgactactgaagcttcgactacttatgcagcactgcgggatctgcgtgaagctttacaaactggtgtgacttatgttcgtagttgtggcacatcctttgatgttgactgtaaattagtgcagatgcgcaagcagtatccttttgaaggtcctcaagtgatgccaactggaatggcaatgtcaattgtcggcggacatggtgatttcaaggtggggttaaatggagagcaaaatgctagtcatttggttaacggtccagaggacatgcgtcgggcagtgcgtgaacagtttgccaagggtgctaaaaatgttaagctgatggcaactggtggaattatgtcattaggtgatgaagttgatgatactgaactttctcttgaagaaatgaagatggcagtagaagaagctcattctaagcatatgacggtttgtgcccatgctgaggggagacgcggtattcattatgcggttgttgcaggagttgattcggtagaacatggtttttatttagatgataatgacttggctttgatgaaaaaacaaggtacatttttgtcaccaacattgactgcaggtcggacaatcgtcgttcatggaaaagatgttgtacctgagttctcataccgcaagatgtgtgcagtagttgatgacttttataatcatgttggacatgcaattaaggaaggggtgaaattggcaatgggtaccgatgcaggaacatacttcaatcgcttttctgatacaccaaatgagttggtggaattagttagagcaggagccacaaattatcaagctttaagagcaggcggcttgggtagtgctgaattgcttaaggttgatcaagaatatggttcacttgaagtgggaaaatatgcggatttcttagttttacgagagaatccattagaaaatgttgctgcagttggtcaaaaagataaacaagtttaccaacatggtttacgtaaattctaaatattttttatcacaaataaagcatcctcgtgagatttttcttgcggggatgcttgtttgtgtagttcaaattaaagtaaacattttactaaattctccagtaaaagcgaataaacataacccaaaatataaaaatagttcttgatttagtatgaattacgatgtagtatttaagccatcaaacgtattactgatgatttgaataagtggagattgaaatgtcaagttttcaagaatactactcagaattacaggaactagcagggtatttactacacaatccagaattaggctataaggagtataaaacttctaaggcagtggaagcagaaattgctaagatttctactaatataaaaatcgaacattattgtaaaacaggacttaaggtaatgtttgataatcattgcccaaaaactattgggattattgcagaattggattcactttatcagccaggtcataaggatgctgaccctgaaacaggagcggcgcaagcttgtggtcactatactcaggtgacaacagccttggctttgataaatgaactgatgaaaaatgatcgtctcaacgagtttggcactaatttggcttttatttttactccagccgaagaatttgtagatcttaattggcgcaaaaagcataagttagctggtgattttacttactttggaggtaagcaggaagccatcaaacttggcgtatttgacgatattgattattgtgtatcagttcatgctataggtgaagattttgagcgtaggactattgaaattaattgtgatttagctggatttaattttcaatactttgacttctttggtaaggcgagtcatgcagcatttgctcctgaagagggggtaaatgcacagagtatagccaccctatttaccactgctttggccttcaaacgtcaacaattaaaaaatccaaatcaaattaggtttaatccagtgatgataggtgataatacagaatcgattaatgtaattcccgatcatgttagcatggggacagatatacgatactttgatgtcgaatatgcacagcaactaatgaagcaattcaatcaagcagcagaaggatgctccctagctttaggcggtaattttaagtcagaaacacaggttggctatttgactttaaggtcgaatagagacatgaatgctttagtaaaaaatgtatttttaaggaatgacaagatttcagaattgattgaaaaccgaggctataccatggcagctggtgatattggtgatgtaagttatctaatgccaactattcagattggatatggtggttggaatggaaccattcatggctctgattttaaattagttgatccagtttttgtactggacatattcccggaatttatctttaacagtgttttagaaatatcaaataatcttaataaaatcaggacttatcgtagaacaaatcaggaatatcttgaacaattaaataaaatgggagcagaaaaatgaaatctttaaaaaattatggtccattaattattttagtgctattgattgacactattgcggaatttatagggatgcaggttttcaaaattggtaaaattgaagtttcaattctaccattagtattcgcagttattttagcgattattatttatttacttccattaaagccgattaagcaactctacaatgataaaagagtaaagtttgctggaaaatatatgattttaataatgttgccactaatggcacgttatggagcaaatgttgcacctaagattaatgaaattttatcagtaggttgggtatttctcattcatgagttaggtaatttaggtacaattttatttggactaccagtagctttattactaggattaagacaagaggccattggctcaacattgggattaggcagagaaggagaactagcctatattagtgaaaaatatacacttgattcaccgaaaggtcgaggagtcctaggtatttacttaattggaacaatttttggttcgattgtcttctcaattttagcaccagttcttttggggatgggctttagttatcaagctgttgcgatgagttctggagtaggatcaagttctatgatgactgcagcttcttcagctttagcagctctggttcctaaacatagtgagacgattctatcatttgcggcagcaagtcagttgttaactagttttattggaacttatattatgtatttcctcgcagttcctttgcaaagattcatgtatgttcacttgactagtttgcttgataaaaagaaagaagtatacccagaacatgattagagaaaataatttttataaattaggtagagatgcattaattttattgcttagtgttagtttagttttatttgttcagtagattaagttagtaaaaaatcctaagagcaccccaattacacctgatacttttgccggcctaggtctattatggctgttttctctgattggcattattatcagtatgttaatgaaacgagttccgtggaagattgttagaggatttcccattctaggctgggtgtctatcgtttcattagttttctgtttgcttagtccatattgtgttcgtgtaattaatgcagtagattttttatcattaactacatcggtattagcctttgccggaatttcagtaactcatagattgaaggatttatcaaagatttcatggaagatcttaattgtggcattatttgtctttttcggtatgtatttcatggatactttgatttctcaaatagctcttaatttgagtggaaaatagaaaaaatatataaagccacgctcaacagcgtggctttttgaagtgtgtcgggcatgacattcatctagtccaatgaaagcttggcgtaccgcaaggtggaccgctctcgccaatcctatccaatatctatttagataaaatggacaaggaattggaacaaagaggcttgcgctttgttcgctatgtcgatgactgcaatatcttcgtcaagagtggtaagtcggctaagcgcgtgatgaagtcaattacatcatggctagaaagaaaactgttcttaaaagttaacactactaaaactaaagtagttagaccaacgaagagcaatttcctaggctttaccttctggaaaacgggcgaaaactggcaagcaaagccgggagacgaccgtaaagccaagctttatgacaagattagagaattgttgagtcgccataaagcagttgctcaacctctatcattagtctttactaagataaatcaagtggtcaaaggctggggtgcaggcgtttttggctttaacgcaaaagaagtcgcaaaaatgtggcaggaggcctttgatactccgacaagcatctccactgtgatttacgctgttattcctggcagaaagaataaagacgtggtagctgattttaaggatatttttgcttaaatagaaattttctctcaaataacaatccaaacaaaaaagacgagccaatgcccgtctttttattttcttgaaataaatttttagttaaaagttagcttttttaacgtaagtgttcttagaaatacgatagaaagtcttgccgtgtaatttaattgcgcgaccataagtgttaacgcggtgacctttcttcaaaactttcttattagcacgcttgccgttcttcttgtagacataagcattgtgcttcagagtccgcttaacggccttagctttcttggcagctgtctttttagcagcagcggcatcagtttgagtcttgtcagatgtagtattggcatctttattagcagtgtcttcagcgaccttacctaaagtaatatcagccttttcgttcatggtcttgcccataacgttaagaccgaattctaagctgccagcgccttctttataagcatctgctgagaaaacatagtcaagggatgagccgtctttagcaacattttcttgcttgccggctacaccattcaatgttaggctagcaaccatcttagacatgtcttgacctttggtcattggtgctttagagccatcaacgtgaataattacttcggtaactttaccgtctttaacattaacttgagcagagttgcccaagaacatagcagcttctgatggggtagtgctgccagttttggtaatagtcatagtgatagtttgcaagtcgctgttttgactagtagcagtagttgcagcaacattagtagcaggttgatcagctgcagacactacagctgatggtgccaaaacactagcgcttgcgagtaaagcaagtgatgttaaaatgattttagtattttttctcataaaagtttcctcccacgaattttagatatcgcttacattataatcaaataaatgttataaatcaatatattttttgttattttatttttttatgagcataataaactgaataaaatatgaaactgtcaaatcttttgtgtaaatagatctttctcgtaaattgattttttaattatttatttaatcaaagtaggattctaaggtgtcctgaacctgaccaaagcctttatgaattcgattgaaataacggtcattgtagctcattgcctgaatgccaataaaagcatcaagcgactgttcagttggaaactctgccttaggcttagctttgcgcttgatcacattgttaaatgattcaatcatgttagtcgaataaattgaagctctgatctgcttgggatagttataaaagaccagcagatctggttctatgtctttcaagcttctgataacatggctgtaaaccttgccccatttggtatagaagtcatgcaggacagctgtggcttcttctttgtttgtctgttgatgcacctgtttgaattcgttcatgatcttttcacgatcgtcgacgcgtactttagcgcagatattgcgcatgacatgaaccaaacagcgttgaaaatgagctttaggataagtcctggccaaggctgttttcatgccaacaacaccatcagaaagaaaaagctcaacttgctttaagcctcgggatttcatgttttgaagcatatctgtccagacttcaatgttctcgctaggcgcaatgcagtagtcaatgacctccttgtgcccattaggcttgatgccaatggcaatatagactgcttcacgctcaaatgtttctcggcgcaaaggaaggtatgtcgcatccaaatagacgcagaaaaacttgtcgcttagcttgcgtttgtggtaagcctcaacctttggaatcatctgcttggaaatatttgatacctgagctggactgtaatggctgccatacatcttttcaattagatcggctatttccctggtggtcacgcccttggagtaaagcttgataatcatgctttccaagatatccgagtgctgcttgtagccaggcagcgtgtgctgatgaaattgaccgttgcgatcccgaggcacttgcacttcaattgggccaaattgcgtatcaactttgcggaaataagcaccatttctagagttgccagtattccagccatttctggcatagggatcatagcccagaaaggcagtcaattcagcttctaacaagttattaacagcctgttgtagctctttgcgcaataaatcatttattttgtctggattgaatagagcttgagcaaaatctttggtaaaatcattcatgaaggagttcttctttctgtatgtgtttttttgttcaaaccaatcatacgagaaaggaactcctttttctaatgtttaaagaaataaatttaaggaatcattcatccttacacaaactattttacagtctctaaaatatcatcttgaaaccgattgcatagttattttaagaactttataatagaaaagactaatagtattaatagtaaaaagaaggatattagaatgaataaaaagttacttaagttaatcgcaagtagttcggtcgcaatgactttaatggcacctggagtggcatttatgcaaactaatccggttgtaatggccgctgaacaaagtcaaaagacagtgggaatgacggtttacaaatacagtaaaaatcaccgcagccatgctaagtcaatggctcaaggttttgtgggagataaggtgcaattaacagttagtcaaaagcatgtgactaagatgacaatccatgtcgatggtaaaaatagtccaatgggcaaggggcaaaacgtaaataagattgtaaaatccctcaagattaatggcgttagcggtaaaaaggaaaatgtttccgccgacaaatctagttttgactttgtttttgcaggaaaagctttcaaaaataatggttgggtcaagatgcaagtcactattgactttggtggtaagatgaccgaacaagcttgggtgaagtatgacaaggttagcggtttaactactagcaagaaaaagaccgacaagaagcaaaagaaggctagtaaaaagagcgtcaaaaaagttagtaagaaaagtacacacggtcagcgcagataaaaaggttcaaaatatcaattatgcggtctataaggcggatcgcagtggcgtttctgcagcaaataatttttacacgcatcatgccaggattgaaaaagtaaagcagggctatgttatgaccttaaaagttgaggtaaagcatgggatggtgaccaaatttcagccggtttcactgggaattggttcaatttcaaacctgcgttttaccaaacaagctggcaaggatatctggacttatcaggtccacttcaagtcgctaaatcagttaaagaagcaggctcaggggagtctgcgcttgagcgtaccaattgccaatattcatgatcgtttgtttaaggtctggtttgcttttggtgtaaaaaatgtggcgcacagttcgactgtaagcaaggcattaaccgaagcaaatagtagcactgattcaagtagtactagtgatgctattactgcagctaatgacgacagtagtaaagatgcaaaaaatgctacaagtagcgctcaaccgcagtcaaagccagttaaaaagcagcagtcttcttcaaactctagtgtaaaacctggggcaaagatgacacccaagaagaaaaagatggcgacgattgcagcggtggaatatccatttttgcctgtgatcgcaggctttttagcatttgatgctgcaattattggtttggccttttacttaagaaataaaattttgaagagaaagaaataatgaaaaatatagctaaaattatctcttttcctttcttgttgctaacttgtttgtttatttttggtgtgactgttagtgcacaaagcgtgagttatcgcacttacaagtatggcacgcatcagacctcgatggctgatggctactatgcgcgtcctgctcaggttgtggtagacgacaatcagtacctggtaacgatgacgattcgcactaagaaagatctaagtccctatccggttcaggtgttaacgattgatggacaagcaccgctaaacgtagtaaaaacgcggcatggcagtgactatgattatcgctatagttttcgcactaataatttaaaacgtgatatttctagtcaaattaaaatagatgtgccacatgtttaccaagcaacacacaatattacttttgcttttgacactacacagttgcctaagttaacaaataaaaaagagcgagcaagtcatgcggaaagtgcgataaaacgcagcgcgccacaggtgaaaaacaagagtgttaagcctaaggagcaattggcacaaaagaagcaagcggcaatagctaacaggcaaatagcgcagaatgcacgcaatcaacgtgctaatcaacaaaggcagcgaaatttttattatgttattttggctggagtgcttagttcgttaattttaattggcgttgctgttttgattgtcgtaaatgccaaggaaagaaaaagtaaatgaaaaaacgtaaaggattaattattggtttaattatatttttagtagcaatcgtcggagtggcaattggtgctaaacgattgattgatcaaaaagttgccaataatgaaaagattgttgccacaagtgcagcgattactgaaatttttgataaattgaacgttaatttagcaggggttccaaagacgcaggctaagttaccagcacgctatcaaaaggtgcccaagattgggagtccaatgaagccaagtgttgaaaagattgcttctttgaatcccactcgtgtctatgcagtctcaactttaaaagatcagtatgatcaatcatttaaagaacaaggcgttaaagttacatatttgaagctggattcagtagctgaccttgaagctacactgagttcattaggcaagcagtattaccggcagagacaggctgattatcagattggcttaatcaaaaaagccgttaaaaaggctaaagcacgtgttcacggtcgtaagcctagagtattgatcttgatgggcttgcctggcgctaattacatgattctaactaatcgatcatatttaggtgatttggtcagaatagctggtggggaaaatatctatcactctgatagtcagatttatttgtcaccaagtaatgactcgctagctactaaaaatccagatgtcattttgcgattagaacatgctttaccaaatgtaactttgccacaatttaagcaagagtttaagaaaaattctgtttggaagacgatgaaagccgtaaagacaggcagagtttatgacctacagcaaccagactttaatgcttcagctaacatgaatgtttctcaagcattgaataaattaagcaactggttgtaccctggaaagtgatcaaaatgaagaaaaaggtaatttggataaacttgattttagcagttttgttaatcagtacgattttctttgcattaactcacggagcaagcaatttttcaatgcaaaagatgactaacagccaattgaatattttgtttaatatccgtgtcccgcggattatttcggcactagtagcaggagctagcctctctgttagtggtgccttttttcaggcaactttgcgcaatccgattgcagaacctggaattatggggatctctagtgcagccagtttatgtcaattgctagcggttattattttgccagaaattttctttggtaaaattattttcgcgattattggcggactgctagcgtttgggcttcttttattattccaaaaaaagatgacgccttatcagttaattatcatcggagtggcattgaatgcagtgttcacggggatgcaggaagttttcactaatagtcaaaatagtggcagcagcctggccacaagtagttggggatcgacgatgtatttattgattattggcgtagtagggctgattttcgcgatttgttttatgaattgggctaattacttgaaggtcaatgatgaagagctgacgtctttaggtgtttctgctaaaaccctgcgtttagtcttgatgctaattgcagtggttttggccgcaacaacaacggcttgcattggtgttttagcttttatcggaattattgtgccacaggttgctcgtttgcttttgggatatgattatcaaaaaatcattccattttcgatttttgctggagcttggtttttattgttcgttgacaccatcggccgggtgattacagcaccgaatgagattgcggctaatattattttggctattgttggtggtccagttatgattttaattttatggaagaggcagaaaaatgcttaaagcgtcgcagattgatttttcatatgggtcaaaacaattatttaatcaattctctctgagcctgcaggagcaccagattacgactttaattggtcctaatggatctggcaagtcaaccttgtttcgcttgcttacacgggcaataaggccgtctgcggggacaattacgctagatgggcaagatatctggcagctagctgcgaaggattttgccaaaaaggtagcaattgtccaccagcagaatcaattgtatgatcagataactgtcaaggaactggttaaaatggggcgtctgccgtatcattccttgatgggggatgaagaaaatggatctgctcgccttcaacagattatgcaggagctagagattgctgatttggcagataagtttatagcgcaattatctggcggtcagcagcagcgtgtgtggcttgctacagcactggcgcaagagccggaatatctttttctagatgaaccaacaacatacttggatttgcattttcagtatcgctttttggatttagtgaaaaaattgaatcgaaagcagaatttgacgatttgcatgattttgcacgatttgaatcaggctttgcaatatagtaatcaggtaattttgctcaaccaaggcaggattcaaaagcagggcaggccagaagaggtaattacggcgcagacgattaggcaaaactttggcatagattgcgagatgatcgaaactgagcagggaaaagtcttgttaatggcaggttctgaggcaaaataaaagaccacgagaaaactcgcggtcttttttgtaataataaattattacttgttaacttcatccttgaagctcttacctggcttgaatgctggaacgtttgatgcagcaatttcaatttccttaccagtttgtgggttacgacccttacgagcagcacggtgacgaagttcgaaggcaccgaagccaactaattgtaccttgttgccttcagcaacattgctcttaacaacgtcgatgtaagcgtccaaaatagtgttaatgtctgtcttagtagcatcagtctttgcagcgatttgatctactaattgtttcttagaaatagtttccatgaaaaatacctcttttaatataaactacgattacttattttaacagtaatccgcgtatttacaaggggaaacagcctctttaaagaatttttttaaaaaggaaagaaattctatgtatttgaagcgaaaaatattgtattcgctatcaaaaatgtagttcatgtaatgattcttttgttttgatttgaaaaattaacttttttcaaaaaatttagacattttttgcgtaataaatgatgggagacaagcctaaattttgaattccaaattttgtacagtgatggaatatataagagaggtgaataatctttaattacacaaaccacatcctcgaaatatgcttaaacaatatcaattaagaacgttgaagaatggattaagaatggcaggtataagactatgagcctactaacttataaaggttaccaaggtacttatcgaagttgaaaatgatactttatttggcgaagtcttaggtctagaaaatacttttatttcttatgaaggaaattctctggcagagttgaagaaagatttcaaagcgggtattgatgattatcttgagaattgtcaattgaatcatgagcaaccagaacaggctaaccaagatgcagctaagttacagttgcaaaaattattattaacatcattagcgtgattggaacaaaataaagctcgaaacttctacaaattgtagtaacttcgagctctgcattaatctgtttttgttcaatacaacgcatgctattacatattggcaaatcgatctagttcatcatgtgttcctaatgcaaccaaaactaggattagttcatgtgtttctttatcaatccggtagtacaatagccaatcgtcattatattgacgattaacgtgcattttgcgattttttcctacagggtgatctttatgtttggctagaaattctttgtcattggttaatattgcttcaacacaatcatcaacataatccattggataatgttttctttcatatctcttgtaagcgcggtagtagcgcttggtaggattaacttgcatgattatttccgcatggcctttttgtattcttcaaaagagctataacttccatgataaatgtgattatcagcttcatagttcgcttcatctagttctgtcatgggtcttagttctaaaggaatgccattacttctaacaatagctttgaaatacattctaattcctgttgatatgtcaaccccatatgaagcaagaatatcttgagcttctttttttaatttatcatcgatttttacactaatttgagccatagtacaacctctattcacaaaacgtattactttatctatatagtactatatactataaatacaaaatatcaatttttagcgtttgcttttaaaagaattttaaaagattataggtagtcttattatgaatactaggggaaaaaactaaaagtgacatttatatctttaatcgtaatacaccagcagaaatttaaacataaacaaagctcgaagcttctacaaattgtagtaacttcgagctttttgtaactattcagaaaagataatttagcggtcttcgtggttagtgaagtaacggtagtccttactcttgtcgaacaatacggcacgagcgttttcaccgttggagattgagaagatagcgtcagggtacttgttcttaacttcatcttctaccaatcctctaagcatttcgttgttagctaaaactgaaccggttaaagcaatcttcattggcttaggatcttcgtaacggtcaagaccgatgatgatgtcacgggctaacagatgagcttgtttcttaataactttgattgcatcatcgctgccttcatcagcaagttgtgcaacgtgaacagccattcctgcaacttctgggttagacatcttgtagaatttagcgttacattcatccatgtgttcaacgccaaataatttagtaaacatttgaatcaaagcgttgtcttcacgcttgtcccagctaagaagagcagattgcattgctgaacgagcaattgcgtaacctgagccttcatcacctaagatgttgccgtagccaccaactgcgattaagtggccgttttgtaaaccgttgtaaactgagccagtaccggcaattactaaggcaccgtcatcaccttcaagaccagcgtaaagtgctaaaagtgaatcagtaatagcacgagtaggtaagttgttaattcttgatgaaatagttgcggcaacttctggagcattaccgacaactgaaagaccggcaataccaacaagaacgcgcatgcagtcaccatcaaccttgtcgatcaattcgttgatagtgtcagagatattcttaattccgccttcgtagtcagcgttaatttggcctgggccgccttctgcacgaccgatttccttgccagtttcgtcatatgcgattgcagttgagtgggtaccacctgcatcaacaccaatttggtatttaagagccatgttgtaaatcttctttctatattaatttatccgaatgataacgtatacattgtattatatttttatacagtaggtctagtaaaagttttgctgttagcgctaacagtggcttttttcttgcaaattaataaaattgttaaactaattaagctaaccaacatccccagtagaagaacccatggtacataaattaatgtaatttgatgttttcctggattcaacttgaagtttaaaaaagcattcatgaacaaggttttattcttgttaattattttgccattatctaaaactaaccagttaatgttattaggaatagttgacgccaatgtcatcatcttcttcgttgtgaaatgattagatttgatgatcaaagcaggtgtttgtttaaagtttggttgtttttgcttaaaacgatgtataatctgctcgagcttttgtgtgtttaagcgccagaagtgaatgccactaaggtctagtttatctttttttagttcaaaagtaacttgcaaccgttgaccacgctggtggctacctagattaatgagacgggcattttgatcacgtactgccagattaatattagcaccattaactgtcattgaaatggcattatcatcgatctcaccgggcatttcaatgtagtaagaatcatcagtctgtggtttgaaattgaaaatgatgcgtgcgatttgcttattgtttttacgattatattgtagttgatcgtttttcatactagttacattaattaattttgctttaggccaattgatctgcttaaacagctgcacttttgcccctgtaactgcttgaaagaatttggtttgattactagtaatatctagagagttaaaattgattttttgcgttttttgtgatgttaaaaagagtaggggcaaagcggcattatttttcactagatatagttgggaaaagcgtttttgcaaatgataatcgctggcatcaacgcggtggttggaattgtcatacttcatttgcttaccagacttgatcgttgtgatttcatcattaggcaaaagataatatttgattccaagtaaatcatctgtcaaagtagttccgccaaaattagtgtaggaattactattgtttagaaatccaagattgttgatcaggttgagtactttttgatcagaaatcgaattaaaattacttaaaccgtaataaccagcgctaaaaggatcatcatcagaacgatagaaattcttttcagttcggtaaaatccagaatcatgttgatttgcgtattgtactgcttggctgacattagtggtaaagttctgataatcgctatttttttgataagctaaattgcctagagatagtactaggttgacgattaactcaagctcgataactaaataaaaaaatggcgcggcaaaactgtgttgatgataaataaagccaataaacaagattccgagggctagaaaagctcccgtggcaatctgcgcatcttcagttagaaagtcaaaatgtgaggcattaaatactatataaacaattaaacctaaagaaaatagagtcagaagtccggtctgccaataagctatacgttctttttgttctaatgcaataacgcctagatttagcgcaaaaaagatcaacacaaagctgaaacgaccaggataccagacagggaattggcctaaatgccagagtaaaaccagtggtgtccaaaaaagagaagcaattaagaaaatgagtaaaattccgtttgctaatttacgctgccagttaatctttttgcttaaaaaatataaaattgtcagcaacaagaaaggcattgtcagataaatgttgggcatcccttcctgcatttcatgaaagttataggccccttcggctaacttagtcagctgttcaactggagaaaactgccagcccaaattccatgaggcagtagaactagccttgccttgcaacatttcaatcagaacggggaagagcataaaggcatctaaaaatgaaccagcgatactttttcttaaataaatccagttaaggcgtaggcgctcctgcttattgatgaagaaaattttgcttaacagataaagcaaaccaaaggctaatgccataaatccggtataaaaattagtgaaccaaagcaaaaaggtaattaaaattaacttattttttcgttgggccagcaagcggtcgatggcattaatcaataaaggaagcaaaatcacagaatcaagccacatcagattatagtgattgccaataacgtagcctgaaagggcataagccgaactagccgctaaagcgtaaaagtgattagtgattttttgcttccaatagtagtaggaagatagtcccgccgctccaatttttaatgcgataataattaaaattgcttgtggcaaaaaatgttgcggaaataaaaataagagtagattgaaaggactgcagagataataggcatcagttgctagcattgaaccgcctaaaccattagaaaaggaatagattaagcgcaagggatgggagaacaaatttcgcctgaagaaggcaagaaaatcaacatattgttgacctaagtcgacagtgagcactccatttttgctgtagaaaaagtaactcaagaaaatcaaagccggtagcaaaaaactaagccagaaaaaaatatttttacgattaattgcaatgtgtcgtgagttaagaaatttaagcatcattaaaaattatataagctcccttatgaattgtagaattgatgtttactttttgttaaaatacatctagttttaataaaggtgatttacgtgaattattttagaaaaaatagtgggactggctcaaacaagcattcctcaactccaattagaatgcgaatcattctaggggtaattttagtcctctttgccatgttaattgggcaattggcttatttgcaactagtttatggttcacgtttcaaggcagaagtgcaaaaaactgattcaactgttgtttcgcatcaagtgccacgtggtgtcatgtatgacgctaagggacgcgttttagtaggtaataaagcaaccaatgctattacttatactaagagtgcctcgactacaacagcagatatttacaagatatctaatgccttgagtaattatatcaagattagcgatgaaaagccgacaaagcaaatggcagcagattattatttagctaatgaagataataatactaagatatctaatgctttgccgaagtcagccaagattgatgctgatggcaataagaagacttcagctgaaatctatcaagcggaattggcttatgttgaaaaaatgaatcctcaactaaccactcggcaaaaaacagcggctttaatctttaataagatttcaggggcttatactttatccacgatttatatcaagaataaaggcttaaccgatcgtgaaattgcccaagtaggtgagcacttatcagagcttcctggtgtgggtatcggaactgactggcaaagatcttatccaaatggttcatctattcaaagtatcattggttcggtttcaactgaaaaatctggtttaccaagtgatagcttgcagtactacttaagaaatggttactcacgtaacgaccgggtaggtacttcctatcttgaaaaagaatatgagccacttttgaagggaactaagtcgactaaccaggttattactaaatcgaatggtaatatccagcagactaagactgtttataatggtcaagccggtgccagcttaatgttaacgattgacgctaagtatcaaaagcaagtacaggctactttgaaacgggtttacagtacagctgttggtaacggtgcagcaagatactctaatggtgcctatgccgtggcgatgaatcctcagactggtgctttgctagctgtagccgggattaatcgaaacacgaacactggtaaaacgactgataatgctttaggtgtaattaaccaatcctttgttatgggatcagttgttaagggggctactgttggtggtggattaattaataaggttattactcccgaaaacaatactttgcctgatacggcaatttatttgccaggttcaccagttaaaaagtcagtttatccagttggtactttcagttcattggatgctgaaacagcgttggaagtctccagtaatatttacatgatgtacttagcaatgaaatgggttaaggctagttatgtaccgaagagctacattcatatgccaaacgatgcctttgacattttacggcgtaattttgctatgtttggcttaggtcaaaagacaggcgttgacctacctggtgaagtgtcaggaattgaaggtaagtcatttaatgacaagggtaatattctttccggttctgtacttgacctagcttatggtaactatgatgcttatacaccaattcaactagcccaatatgtgtcaactattgctaatggtggtaagagattgcaaccttatattgtgcaatcagttggtaaaactagcaaaaatggcaagaagatttacattagctacaataagaagccaaatgtccaacaagtaattccttggacgcttgcggaacttaatgtggttcaaacagggttctatcgtgttgttcacggtacaaatggttggggaactgctcacccattgaaaaatgttaagccatcaatttctggtaagactggtactgcacaaactttctactatgatgctgaacaccctaatagaaagcacaatatcgaattgattaatgcaacctttattggctatgccccatcgaaaaatccaaaattagcagtggcggttgttttcccaggattagaccctgatggtgaaggaacatacacattgcaagttgccaaagcaatggtacaagattatttcaaacttcattcaacaaaataaagaataatactggtcaaacagcttgaaaaatgctattctagtacagtcagaataaaagtgtaggtggtgaaaaaaatggcagataacatcattttagaatgcaccgaatgtggcgatagaagttacttatctaagaagaacaagcgtaagcatccggaacgtttatccttaaagaagtattgcccagttgaaagacgcgcaacacttcaccgtgaaactaagtaataaaccaagatagcaggttacgtgcctgctattttttgttttttggacaaaaagatggaaaaatcagaattaagaaaagaacaaatcagtaaattaaaagaatttgccaatactaaagaaaaaagagcagaagatgcgattttattagagaaattaatgtctacagatctaattagaagaagtcagacgattggggtaactgcttctttaccactagaagtagatacttctgaattaattgctcgtttgtgggataaaggaaaagaagtttatctggcaaaggcacgaggcgatcaaaatcatactttagactttttacgctatacgtatatgagcaaattggtaaaatctaaattcggtgtggaagaagtcgccgatgaagatgcgaaaatcaataatgatttggatttagtcattgtgccaggtttagcctttgccttagattcgcatgttcgacttggctttggtggaggttattatgatcgctttttggctaagcatgatcctaaaactgttgctttagccaatagcaagatgacgttcgatactagcatttggcctatcgaaaaaaccgatattccggttcaaacaattgttactcctgataaaatttattaaaatagtcacaatgacgaagataagggggattaaatgaatactcaacgaaaaattaacctctcacaatcatttgtgactttaggaattttagtagttttattaataatctttttagttgaagtgtttttaggtggctcagagaataccaatgtcttgatgaaaatgggagccatgaataattttgccgtggtggctggacaccaatggtggcgcctatttacggcccagtttttgcatattggcatcatgcatttggtttctaatgccattattatttactacatggggcagtatatggagccattaatgggacatgtgcgctttttagtaacttatcttttagctggggtcggcggcaatctaatgagcttggctttcagtgctgatcgcggcttaagtgctggtgcctcaacagccttatttggtttgtttggagccatgactgccattggcttgcgcaatttgcataatccaatgattgcttttttaggtcgacaagcctttgtcttagcattgattaacttagcgcttgatatttttgtgcctggaattgatatctggggtcatattggtggcttaattgccggcttcttattagcgattatcttgggcgatcgtgtaatgaagacctacaatcctaagtggcgcgtattggctgctgcagtgttagtcgtatatgttgtttggacggttagaacaggaatgataattaatttctaatgaaaactctctacgatgtacaacaattattagaaaaatacggaattttggttcatgttggcaaaagaatttgggatattgaattaatggctttagagctcgacaatatcaatcgtgccggtctgattgaccaacatgattatttgattgccaagatgattttgagtcgagaacatcgaattgaagtcaaaaatgaacaaaaaaaggcgcttaaagatccgaaaaatgatagccagtaaattagtttagcggtatcataatagatgtaagtttttatgaaagggcagatttagtttatgtcgagttttttaattgtcttagatttagttttattagtcattattttagtcatggttggtatctgggcttggaataaaattcaagctaaatcaattggtggcgaattgactaatgaagaatttaaagaaggcatgcgtaaggcacaaattattgatctgcgtgaaaaagaaccgtttaaacgcaagcatattgatggcgctcgcaacttgccatataccatgcttaagtatcaatatactgagcttagaagcgacttgccagtttatctttactcagattcaaagaccattactttgagagctgcccgttttttaaagaaaaagggttttgtttctatccattggcttaaagatggctttgaagcttgggatggtcgaactaagaagtcaaaatattaaatgaaaagaagacgcatttggagggggtaactctaatgcgctctttttttgtatcaaaattaagaaaggtgatggggatgaaaaaggtactagcgattgtaggaccaacagctattggtaagacagacttggcgattgatttagctaaaaggttgaacggcgagattatttctggcgattccatgcaggtttaccaagaagtggcagtgggaactgcaaaggcaactgcagaagaacaagcgcaagtgaaacactacttagttgatacgcaatccgtttttgacgagtattcagttaaagattttgtggatcaagcaacaaaagcgattgaagagattagccaaaaaggtaagttaccaattattgcaggcgggacaggtttttatgttaatgctttattgaataagatgcagctaggcgagaaaactccagaagagcgtagcgtttcgcaaaagtgggaaaactacctcaaggaaaaaggcgcagaaaaattgtggcaggtcttgaatgagcaagatcctaaggcggcagaaaaaataccagtagccaatagtcgcagaactatgcgagcattgactgtgattgagcgtacaggcaaaaagttttcagagcaacaaaagcagatcgagccccgttatgattacttgattattggcttgaattctgaccgtcaagagatatatcgcaggattaatttgcgtgttcataagatgatggagcaagggatgctcgatgaagcaaaatttatttatcaaaatcgagcacgagagtatcaggtcttgcaagcaattgcgtataaggaatttttcccttattttgaagggcaagagacgctagagcatcgcattgaagatttaaagacagcttcgcgccgctatgctaaacgtcaattgacttattttagaaataaattaccagtagtttggtttgatccgttagatgatccgggttgcgaacaaaagatattgaagaaagtcaaggaatggaaaaatgaataatttgccagaaaaattacaaaaaattgttaaagaagttgatcaacagatcgcacctaaactggttgagattgaagatcaaattgtctataatacggctaaagttttggcggcttaccaagctaatgatgtcgctgaagccgatttaaatggggctaatggctatggcgacgatgatatgggaagagataagctagataagatctatgctcaagtttttcaaactgaagatgcggtagttcggcctcaatttgtttcaggtactcacaccttgtttgtagctctagcaggtaacttgaaatacggcgatacgctaacttatttaactggacagccttacgatactttgcaaaaagtgattggcttgactgatgataagcgtggtactttagtcgagcgcggcgtgcatttttcatatgtgccgttaaccgatgatgggttagttgattatgacgaggctgaaaaggttcttaaacgtgatcagcctaagatcgttgccattcaacgttcacgtggctactccaccagaaagacctttacagttgatcagattaaggacatgattgcctttgttaaacgggtcagccctaagagtattgtctttattgacaattgttatggcgaattttcggaaaaacatgagccaactgagtatggtgctgacttaatggcaggatcgctgattaagaatgctggtggtggtctagctaagaccggtggttatattgttggtaaaaaggacctggttgaaaatgcaaaacttgcattgactgctccaggctgcaccgatgagggcgccactattggcaatttgcatgacttttatgaaggctttttcttggctcctaatgttaccggtatggctgaaaaggggatgatttttgcggctgctttgtttgccaaaatgggcttgaatgttaccccagcttgggatgagaagcgaagcgatattattgagacaattatttttggtgatcctgataagatggttaaatttgtgcaagaagtacagaaaaactcaccgattgattcctttgtaacgcctgaagctgtgcatatggagggctatgaagataagattattatggctgctggtaatttcgtttccggttcaactattgaattttcagcggatggtccaattagaccaccttatgcggtttatatgcagggcggcttgacttatgcgcatgacaaagtagctattattaacgcggttcgtgatacattttttaacaaaaaataaaatttaaaaataatcactagaccaatttgacttttttaaattggtctgctattgtattaaacagttctaggagataagaataaatcataggaccataccaatttaatattttttgtttttataggtgaattaactatgagtaaacaatatactgcagaagaaattaagcaagaagttgaagacaaggacgttagatttttacgcttggccttcactgatattaacggtactgaaaaggccgttgaagtacctaagagtcaattagataaagttttgactaatgacattcgctttgatggttcttcaattgatggctttgttcgtcttgaagaaagtgacatggttttatatccagacttctcaacttggacagtattgccatggggtgacgaacacggtggtaagattggtcgcttgatttgttcagttcacaccactgatggcaagccatttgctggtgatccaagaaataacttgaagcgtgttcttggtgaaatgaatgaagctggattcgacacttttgatattggttttgaaatggaattccatcttttcaagttagacgaagatggcaattggactactgaagttccagatcatgcttcatactttgacatgacttcagacgatgaaggtgcaagatgccgtcgtgaaatcgttgaaactcttgagggcatgggctttgaagttgaagcagctcaccacgaagtaggtgatggtcaacaagaaatcgactttagattcgatgatgctttgactactgctgacagatgccaaacctttaagatggtaacgcgtgcaattgctagaaagcacggtttgtttgcaagctttatggctaagcctgttcaaggtcaagctggtaacgggatgcacaacaacatgtcattatttaagaatggcaagaacgtcttttatgacaaggatggcgaattccacctttcaaatactgctctttacttcttgaatggtattttggaacatgctcgtgccattactgcaattggtaacccaaccgttaactcatacaagcgtttaattccaggttttgaagctcctgtttacattgcttgggctgctaagaaccgttcaccacttgtacgtattccaagtgctggtgaaatcaatactcgtttggaaatgcgttcagctgatccgactgctaacccatacttgttacttgctgcatgtttaactgctggtttgaatggtattaaagaacaaaagatgccaatgaagccagttgaagaaaacatctttgaaatgactgaagaagaaagagcagaacatggtattaagccattaccaactactcttcacaacgcaattaaggccttcaagaaagatgatttaattaagagctcattaggtgatcacttaatgcacagcttcattgaatcaaaggaattagaatggtctaagtactcacaatcagtttcagattgggaacgtcaacgttacatgaactggtaaaaataaataagtaattggaaaatctcgtggtgattgaggccacgagatttttttgtaaagtatagatttttcaaaagcatatctaatcgtaattagtctaattacgattagataagtgaacttatggataagtttttaaatctagtaggataaacttttaccaaaaatcaaaaaatattctcttcaaagaagagcaaactgctatataattgtaataatgactggactggtatccctaattagtttagggatacttttgtgttaatgagaatgtattggagtcgatggaatgagaaataagacattagtagcattttgtttgatagctgcaatgatcaatttaactgcttgccaatcgcaaaagcagactaataatcgccaaactattgaaaaatctggtgtgactcagaaacagactcccaaaagattaattgttaagagtatgtcagatactgaaaaatctagtgcaatctcaatttatggatcgatgaaatatggggatgcatggaagactgcatatagtgatgccaagaaaaatcatttgagcattagtgtaaaaaatcgaactggttttaattggataaaaaaaggtagaggttacatttatgaagtaactggcaatggtcaagaaaataatgctttttatacaatgaaaagtgaaaccgtatatttttataatcagaagaaaaatttaggtgtagcaagtttatctgaaatagcttcatatttaagtgaacataatcaagtaaaatctgtagaaaaattagcaactaagactactttggctgctgaagttacatctgacaaatatggggttaagggtgacgatggcctagcattagttccaacgagactttggggtacttggtacaactataaaggaaagaagttagtaattactgatcatactgttaatggtgaagaaattcatcatatttctaattctggtgtagcagcagaatccttagatcaaacgaaaaagtgggctagagctcggatcgaaaatattaatggattaaattgctatcatgttcaaacattgaatgctcaagattttggcttactttattctgtccaaaaagataatggcaatacggcagtagtaacttatagcgttgatacaggtcattatacggctacttattggaagagcaccaagatagccaaggaacaccgaaatgcagaatttaagactttaaattaatatttgtaaagaagtattaaaataattgcaatgaacaagaagtataatttttgtaaaataatcatgtaagaagttggcggatcgtattttttataatactattaagcaaagagatagaattattgaaagaaaaggggattccttttgaaaagtaaattaactgttttggttgcaatttcagctgctttaactttagcaggatgtagccaaagtacacaaggtaatagtaattcacaatcacagtcagaaaaatcaagtcaagtttctaagagtaactcagaaaaaactggcacctcagaatcaagtaacagtcaaaactcagcaaaattatctgctgagaatatggactataagacgcaggctagtgcaatctctgtctatgctgcacaaaagtatggcgacacttgggaaattgcagttaatgctgccaaaaatggtaatttaggtgttgcgttcagaaccaaagccgcaacaggtattacttctgatgactcaggatatgtttatgaggtctccggtaccggtaaaagcagtaatgctcgttacatgctaaacggagatggagcacaaaagaaaattactatttttgttaagcaaagaaaccttggtactgtaactttacaagatgtagttgattacattaataaaaataatgatgttgatctagttcaaagcttggctaaaaatgccaaactaaatgttaaacttgaaggcgataatgacaatgcagctggtgctaaggaatctgctagtgccgtaattccatcaagcttgcaaggtacttggtacactgcagatactggcaatggcaatatcgatactttgactgtaactgctaataagatcaatgatgaagctggttttagcatggatgtaaaggctaaaaattcaggttcatcaactagttcaggctatatgaaacaagctactattaatggaattaatttctatagttttactaatatgggtcaagaaccaggtcaaggcagtacatatttggcaccgcatactgaaaatggtcaaagtgtaattgtttcagctaactctaagggaacaactaatgctgtctactggaagagcgaagccttggctaagcaaaactccaacaagcaatttagcgatctacagtattaaaagtgaataaaatatagaattaggcgatatctttgtgatatcgccttttttgttgtgaaaataaatttctaaaattatggcacttcctttcaaaacatatgtttgatataattgtaaaagtgtttgggcagactaatgaactgactattgagtaataaggaaaggaattatatggattttttagctcaaaagaaggaataccgttttaaaaatattgaaaatcaagtgtgtcgtgttcatactcatttggctattaacaacaataatttgaaagtttggagagaaaatgatgataagaaaagtagaaaggctactaagttaataatggattcactacaagatgacaataaatacatgtttcctgatttagtaatagttagttcaaaatatttgaaggtagtagctgcttacgatcgcgaaaaagatgttatttacgcgtggtgctagttaaatctttctagacaataagccaaattataagctaaaattgcaatttccaaccggctttgaaagcctatcagactacgtgctcgattgttctcggcattgtaataggtcagaagcgaaaagtcgctttcaattgttctgcgaatagccatcaattgatgatcattgtgctttttagctcctgtcatatttttacgatatggtgtccaaagttcgtaacccatttgttttagctgttgatgcagttctttgcctaaatagccttcgtcgccaagaagatagtaattagatggatgggtattttctatcagttcaactgtctccctggcatcatgaactgatgcctttgttacgacataatcaagaatgtaaccgtcatcgctaacaatggcatgaactttgaaaccatagaagtaaattttcttggtggccttataaccaatgttggcataaccgcgaaaaattttagcacgatagttgcgaattggttggcaaacaggtaccggaaagctgtcaatgatcaagaactgtccattcaggtcaacctttttattcatttcttgccgtatctgataaatcaattgcaatagctgacgtgaacgccgattaaaacgtgagtgtgataaacaattgaaacattcacagaatcttctttgtgattcaattcctgtcttagcttgccagataagtaaagccaaaatcagactgtccgtagttttaatttgatcaatatttcgccgatgagtaaactcagccggtgcatacaaacgataccagtgccgacaaattatcactaaatctttaaaactaacttgtaaatggtggctaaaacgcttaagcttaaggcagttcaatcagatcaggctcttttctattattatacaagttgagtctaacaagattggacttttttattaactaaaacgatttaactagcaccacgcgtaatatattatatattttagagcagaagtaaaaaaattcgaaattgtttattaattatctgaaaattgaaagcaccaaaatcaagctcaagtcctgtcactattgagctttcttagacgtaattagtttttatatgatctgtttcagtgcaatttgtatgaatcgtggcagttggttaataaagtcattgattacttcatctatcttttcaaaactattctgtttaagctcttttaattctgaaattaagtagaccaatgcatctacgaatctaatatcaggtaaggattcgttcattagatagaataaatctccgattgtcttatcatctgtattttgtctttcctgccaggtcaatagatcataagttattgctgtaactgcgatatagccacattggccatcatagctttgaacttgagatttatctaaagcaagatattgcttagacgtcttaaaatatgtttcaatttgccatctacgaccataaagttggatgatttcttcagggctaagctttgtctgagtagtagctaaaaccaaatacttgttcttgtttccacggttggagacaaagacgagctttaataaaaagctatgtccatgatattgagcctcaactatgcttgaataaagataatgtttctttttacggatgtttgaagcagccaaacgatcatacaagtctttaacgctatagcggcaatggcgataaatgtaataaatctttgaactcttcttgatcatgccaagtccatctaaaccgatcttctttaaaatccaaaacattcttggagaagaaaaccaagaatcgaataagacgtatttagcttctactcctaatcgtaaggcttgtctaatcaactctacagttacatcattcatctttctctgagcttgatttctccttttaccagaaattgaacgttcatcagcagtaatgggagcagctccaatcatatttttcttggttttggttgacatcaaggcaaagttaaccggcaagaaggtattgccatcgctccagcctaaagttaaaccacgatatccgttcaaatactcatgcttgtcatggtcatagactttagctagcaattcggtctttttagaaaaagaccgagccatcagcgtatcgtcaacgataaaagcaagtcggcgtcttttatcgataaatggttttaagcagccaatgagccgggctgcaatcaagcataatagtttttgccagttgattcttccatcgttaagtacattgcgagcagttctaacggaaaaacgtttgtcatccttagctctgaataaagaaagccgagcaaaatgtactgacatcagccaagagataatcatggttaatgaaacggtggatttacgcttaaaattgacttgtttagttaacttagctagaccaattagattaataaatgaagaaattaaggatttagtatcgttttctgtgtcgatttgttctatactgttcattgcgcaggatctcctttactttttaggtcgacacttaaagtataacgcagagagatcctgcgtttttatttttgataagaaaaagccaagaggcgcggggaaagagcgttaatcttagctttcaagtttcagttaattatatagaaatggttatttaatttgcttaacctaatgctatcgcatttgaaagagctttcaatatcttttaagatgttatctaggtttgttattaaatatttacgcatatagacttctttatttaacctgctaccctattaagtgaagagacttataacgaagtttaagaaaccgactacttcttaaataaatgagtttaaatttaaagcttgaaaataataaggacttaaaaatttcgagctttcataaataataaataggggattaggaaaatgaaaaagagcattaaacttttatcaacaattagcattgccgttgctttagcaggtggtgcaattactgcagttaacaatcaagaaacttcaaatgttgatgctgcatcaataacattaccttctggttacaccaaggatgccgttatcaaatggaaccaaactggtaaggccagcaaggctttggtaaatgcctcaattaagggtatgaaagaaaataatgatagtgatgctggttcagacaacaccttggttaatgtaactaagttaactgatagtcaaaaagttgaattaagcaactacactttggaattgattaattctgctcgtaatcaacttggcaagcaatcttggacttacaagcgcggtgcattaaattttgctgaccgtgtagctaatcaatattactcaaacaacaagtcttgctgggatcctgatcactatgttactggtattgaacgtgcagccaaggcttcaggtcttaactcacgtgttggtcaagtttacgaagatgaagcaggtttgccaatttcttcagaatttaacaccaactaccgtacaatgtcggctttgaagagccaaatctacttcaacgttaagcagatgctcttcggtggctttgctggctcaagtagccaaatgggcgatgcttctaagtatactgaatgggaacacgctggcgacttgcttggctgccgcactaagcgctacatccaaaactacaagaaattcaataattaatctgacgttgtagtttgaaactaaaaaagtttcctaatccaagagttcaaacggtttagtcacctgtctgggctctttttaatttgcttaagaatattttgaataatatgattaaatttctattatgtgagattttttcaaaatgtggttgactgtaaacaacaaatagtaaagaatacagttaatgaaaagcgaggaagaacttcataagttagtggaaaaggttattgatgattttgctgcttgggatgaagatgagcgctataaggagccagaaaaagaactacgtcagctgttggaagatagtaaggtcttgggctttataatgtacactagattgagtgatattctgggttggcatcatcgtatgttgactgaagccaaggaagagagaaccttaacagctaaggaggaagtattactgaatgacatggatgcagttcatgatttgatggaacgaaccatggatgaagagaatggtaggttgtagaaagcattaaaattacagaaaaataaaaccacattgctcaaaaattgaagtgagtaatgtggttttttacgttgtaattattgtagtagccaatcaataagattgattttttgaatcccgtcgtagttggctgtgggattgatagtatcaagggttagtaaaagtttggaatgaactccaaacaaatgacatttattgctgctttttggagtcaactccaaaaagctgactttatcgttttgatggaattgaataggggcaagggagatattgtaaaagcgagtgtcgagtaaatagtgaactgagtgtctgggaaaaaactaagtctcagatcatgaaaaaagaacgttgaatttttgtttcaacgctctttttgtatacttttagctccagccttgatattattaaatcatcacaaaataaaaacaaaaaggtggaaactaacatgtacaaaaattatatcacaggtcaaactgctttaacacttaatctagattttgccattccggccaatcatttggctaatgtcatcagctggtttgtagattcaattccagaagatgttttagtaggcaagactgctaaaacgggccgcccagcctatcatccagccatgatgctcaaaatactgctttttgcttactccagaagagttttttctggcagaaagattgagttgatgctggaagaaaatctgccaatgatgatcttggctgaccagcaaaagatttcatatcatactatcaataattttagatcaagcagccatgccaatgaactgattaaaaagagctttatctacttcactaacctgttagaagatgaaggcttaatcaatgaaggtgctgcttttatcgatggtactaagattgaagctgatgctaaccgctatacatttgtctggcgcaaagcggttgaaaagtatcatgaaaagctgaaaggccaggcagttgaactttatgatgaattgattactaaagaagtagtcaaagaaatggaaaaagaaaaagttcaaactagtcaggggctaaaggaattagctcaagaaactgaagcagaaattaacaagctgactaaagagattgagcaggaaaacaaagccattcctggcggttcacctcgaaaagccaagcgacgtggactaaaaaagattctgcaccggctaagaaaagattatgtgccaagaatgcaaaaatatgaagaagccgaagagatctttgccggacgcaacagttattccaaaacagatcatgacgccacctttatgcatatgaaggaagaccacatgaaaaatggtcaattaaagcctggctacaatattcaagcagtcacgaccgatcaatatgtagttgattatgccatctttcctaatccgacagatttcaaaactttggagccggttttggatcaaatgaccgtgttggacaagtttgacaaaatcgtcgccgatgctggctatggcagtgaatacaattattcgatgctggaggaaaaatatccagacaagaagtactttattccctacactatgtatgaaaaagaacagaccagaaagtataagaatgatccaactaagctaatcaactggtactacaatgaaaaagatgattattacattgatcatcatggcgtcagattcaatttcaaatattacagccagcgtaaggatcgttctactggtcaggtccgtgattttaaggtttatgaggcagacgagttccagctaacgccagaattggaacaattggctaaaacagctagcggccgccagcgccaagttcgctataatcctaactggcaatatttaaaagaaaaagcaaaagaagttctccaaagcgaagaaggcagacacatctatggcatgagaaaatatgatgtagagccagttttcggacatttgaagaacgtatttggcatgcgcagaacgcacctgcgaggtaaagagaaggtcgaaaccgatatcggaattgcctttatgatgatgaatttgaacaaatattgtcaaagaaggtggctgaagggccgatttttattgttaaaaattttaaagagaacaaaaaaacgatcaagattcttaaaaaaggaaatcttgatcgtttttattcatctggaagctagttttttcccagacactttttctacgtaaagtcaagcataataagaagtttgacttcattttttgtttaaatttcaacttaaacatcttttagtgtcgatttatttttttagttagacacgacaaataagcccagatccatatctgatttttgggcttagcgttataatgtacttgatcaattaattacgactaaagtctttttgattatgtgtggctacgttgtaatcatatggttgatcattgataatcagggcataaatggttctgattagtttatgaattgaagcaatagctatctttttgaaccctttggtttgagaggatagctttttgctttcataataatctgctatatgacacggatttgtcttagctgcattatcaatttgtccaatagctcgataaagcaacttacgtgcgactgcattgccatgtttagtaatacttaaattagagtccatttctcctgactgatatctgcctggatcaattccgataaaagcattgattttattaggattactaaatctgcgtaaatctcctaactctgctaaaactctgacagcagtggtctgtgcaaagcctggaatgctttctaggttttctaaatcatgattaggcaaagacttcgctaacttaaccattcttgcgattaaattttctctttgatcacttaaattaagcaatctgtgtgcataatactgcacttgctcgacttctatgctagagcaagatacaactggataagcttgataagctaattcaattaatttatctgcagtccttagagcgtgtttaaaagcaatcccctttaagctcattaaccagttaataagctgttttttatcttctcttcttactaagtcacaatgaggatatcgcacaactatttgccagtaatttttacctttagcagaagaaaatagattttcaatttcaggaaaagtcgattgtagagcttggtaaagtcgatttttagccattactaagtcagctgttaactggtcatagaagcggctcaaagcattaagctgcttataagtttgagattgaagttgattaattggatgatgatatagtctttgaattaaggctaaatgataagcatcagttttatcagtcttattatgacgtagtcccatatccatttcttttttagctttaagaggattaagaattacataatcatagccatagtcttccagaaaagattgcagtgtacgtgaataaacaccggtagcttcaaaaataatttgcggatgtttagaaaaagcggttaattcatgaagcaattgaataaaaccaggacgattattagtaatggttagttcatttttgctttcaccaattagttcacaaacagtagaagtagacttgcttacatcaattccaaaagtaacttgcataataaaaacctccaaaacttagtagtaaaacgtatttacttaagaaatcagatctaattttctaaactcgacatctagtgtccacattcttcgaagagactattgaaaacttaagtaaaactgccagtttattatgcgacatcaagtgtctaaagacctcagggcatatcgttttactactactttaattctacaaaagaataaaaatagtgaatcaattatcccgtcggataactaattcactatttagcttagaatgtttactatgtctaaatttaataaagaacaaaaaatagaaatttatcataaatggaaagatgaaaatatctcaatcagtcaattggctaaagcgtacagaatgaatctagctaatttagactatatgcttagattaattgatatgcatggaatagaaattttaactactaaaaaccaaagctattccaaagagtttaagcagcgaactattgaacaagcaatctttggcaataaaccatacttacagctgcctttggaactggggtttaaaagtattggcatgcttaacaattggattagagaatataagaaaaacgggtataatgtcattatcaaacagaaaggacgccctgcccgtgaccaaagaaaagcagaaatctcgcaaggaactggagaaagagatccagcagctgaaagaagaaaacttgcgattgcgtattgtgaacgaatacgtaaaaaaactaagtgccttggatcaagaagatcagaagaaatagctagggtgattacggatctaaggcaagaattcaaagttagtttaaattatgtattagctgcgattgcagagcaccctgagctacctataattgccagaagctcatactacaagattatcaaacgacagcccgtcaagcctaaacggtcaaagcttattgctagaatccatgagatttttaatcatcatcaaggccgctatggatatcgcagagtagctttgcagttaatcagagagggctggaaagttacggagaaaaccgttcgctattggatgcataaattaggtcttaaaggcatcaggcgcaataagcgcaaatattcaagctataaaggtactattggcaaaatagctccaaatttaattcatcgtgatttcttcgcagccctgcctaacacaaaatggtatactgatatcactgaatttcatcttaataatgaaaagctttacttatcgcctattctagacggctgcggtggcgatatagtttcttatactatctccaaacatccagatatggatttagtaatgacaatgcttgacaaggcttttgccaaagaaacagctcttaataactgcatttttcatactgatcagggctgtcagtatcaaagccctcgttatcagcgagctttaaaactccatggtatcactcaaagcatgtccagaaagggcaactccatggatgatgggctaatggagaacttctttggcctgctcaaaactgaaatgttctatgatcaagaatacaagtatcataatcttcaagaattaactcaagcaatcgaggaatatatcgaatactataacaacgaaaggataaagagcagattaaaaggcttaaccccgaaagagtatcgaagtcaagcctctattaatccaatattttaattgtctactttttacgtctcagtacatttttacattaattactattatttttcttcttaattagttaatttaaaaagttctggtcaaaacctgacacctttgacacttttcctctcaacaccttgatactactagctttatccatcatatctccattgacaccaaaacaattcaaaagctacccaatgcttgatataacaataatctgctagtgtcaacttaaccaacaccagaccgacaccatttgagttaataactgacacttttcaaatttcaagattcggtgtcaacaacggtgtcgcacatcgactaaaatgtgtcagctaaaccgacaccaaattttaacttggctatgtagattctcaaccattcgcactatattaaatgcaagcctgttcaaaaacttttagctttttgaatgaacgtgctgggcctacaacatcaagcttaaatgatgttcagaaacttatggtcaaaaaggatggattgaaatgacggaatatggctatgctagggtgtctacaaagggacaagaactagcagatcaaattaatcaattgcaaactgctgggatcagtgaggattgcattttctccgaaaaatttactggaactacaactgaccgaccacaatttgctaaactaactcaattggcgaaaccgggtgatgtgattacggttaccaagctggatcggttagctagaaatacccgggaagcattaaatgttattgacccactaatgaatcaaggagtgaagatcaatgtacttaacattggcatgttggaaaactcaactgtgggtaaattagttaaaacaattctcttagcagtggcggaaatggaacgggatatgattgtggaccgcacccaataagggaaacgttatgctaagttacaccggtctgattatcatgaaggacgaccccaaagagccattaccccgcactaccaagccgcttatgagtacttgcttactcattcctacaaacagactgcgagtgcttttgatatttcgatttcaactttgcaacggatccgaaagcaggtggagcaaaataatatagcttagttttaaaaaagtatatattattttgcgctggaggatttgaaaaatggtaaaatgttataccccatttatttactggattgatactaccggtctagactggcaaagcgatgaaatcattcacctaaccataacggatttatttggtaacattgtgttctcacatctgtttaaaccagtgaaaattgaaagttgggacccaactcagcagggtttccacacaaaagcacttgccccccccacatattcaatatataataaattacgcgtggtgctagttaagtcgttttagttaataaaaaagtccaatcggattagactcaagttgtaacttaaattaaatagaaaagagtctgatctaattgaactatctcaagcttaatcgtttttctcaccatttacaagttagctttgctcggctaaatgtaatttgtcgttctttgtacaagctttgtgctcctgatgagctgaaataccgtaaaaatattgatcaggttaagctcttagacagttctattttagcaatgcttatttggcaaactgaaattggtatcgaatctcaaagaagattttgtaaattctttgtcggtttgtctcattctcgctttaatcgtcgggcacgaatgcttttgcctttaatgcgctgtatccgtcaagattggaatcaagaagtaaaaacagctggagaattcttaattattgacagcttcccagttccagtttgtcagcccatccgcaactatcgcgtcaagatctttcgtggcatatctgatatcggatataaagccactaagaaaatctattattacggcttcaaggttcacgcgatagtaagtgatgacggctatgtgctttggacaccatatcgaagaaacatgaaaggcgctaaaaagcataacgatcatcaactgatggcaattagaagaacaattgagagcgacttttctttgcttagctactataacgctgaaaataactgggcaaggagcttagctggttttcagcagcggctagaaatagccattttggcttataatatagcatattgcctagaacgatttaactagcaccacgcgtaataaattgcgtcttagaaagaggatataaaatatggacaaattacataagcaacaagtagcaaaacgacaacgatttgccattaagaaattaacagttggaacggcatctgtccttgttggcttaaccttcattattagtggtaatgccaaggcagatacgacagttgctgctcaaaatacattcacgactcaagtgactgatccacaagttagtgcccattcaagcaatattcggattagcgacgaatcaaatacggttgttcatcaaacttcatcaacattagttccaaataaaacaacaacgccagcgcaacaaatgccgataatccataaaacacagcaaaacaaccactgcccagtaagtacaacaaacacagcaaaacaaccactgcccagtaagtacaacattactatgaattttcgcgatgtcaccctacataagccaattcaagtgattagtaatggtcattatgtattcaaacaacctttcaagcagaccacaattcgaccaggggatagtgtggatcaagaatttactgtggccggttataaattaatgaattcagaagttttgaataagtatttctattttgataaacaaggtaatgcctgccttaagaaaggtattactacgcaagacattaacattaatttagattacgcatcattgtcaccaatcaaagtagagtatgttgatgtagataacgggcatattttagcatcaatcgttctagatagtttctggatggcccctgaatctccacaacaccgtgctggtgataagaaagcaccggatgcatcacgctatgaagccgcagccattaatattcctggatataaattagtttctgaacctgttttaaagggtaaaatcactggtcaaactcgaaattcgttagctgatcctaactatgtttatttaactttcaagtataagaaggttataaaaaataattctgatagtaataggactgaattgttacttgttccagaagaaacaaatctaccgtacaaactctttacgattgctggtagctatggcgaaaggattgacctaaacaatggtaattatgagaaaaaaatgagtgaggagattagccattacgaaaaacaaggttactcctatataggaagtacagggacatatcttaattctgattatttcaattggtacgctaaggggatacatgtttacttgctaccaaacaaaccagtaactgtgaggtacattgatgagcaaggaaatgtgcttaggaataatgatacgcttgcgttcaacctagataatcctaaccaaaaaaataatggggttaatccgcaaaaaggctggtatgcaaagggtccatggcaagtccaacctaagaaaattaaaggttatcgtcttgttcgtactcttggagcgacgagtggccagtatactgtataccagtacatcacaacttttgtttacactaaggacacagatccaactgatcccaaaacgccagagacaacaacaactgatccaaagacaccaagcgataagcttccggacaatcctggcaagtctggtcagacagttccagttaatattcacattcctgatggttatcaattagttcctggtgaaagtgttccaacattttacaccttcaaggatggtaaccctaatcaaatcattagttgttggttgatcccaactaatggcggtcaaccaacaactaatgatcatcaaggacaaggaacaccagctactaatacgcctacaaacactactcctaatggaaatgctgttactggcaaactagaaggtaatgttcctaacatgcaaactgggaagacgattacgtttcaaccaacgacagctaaggataaccaactaccacaaactggtaatgacaatagcttaacaaccgttgccgggattattgtaagcctgttaaccagttgcttagctgttcttggcattaataaacatcaaggctaatatgattacctaccaaccattccgaagctaatcaagacgcgatgctttaattagcttcggaattttgaatgatatatcattataataggatggaataaactttatataaatataagtaatggggattgatttctaatcttttaagaatactgtttatggttgattttttatacaatgtttccaactgagagtaaatataaaaagggagatactatgttatcagcaaagaattattacggccgtctggtaaagttaaaaccaaaacaagatcatttttcacttcgtaagttatctattggtcttatttctgttaccataggtattaccttatacttgggagtggacaactcctatgttatggctgatacgaatttgagggataataacaatcaacaattagccggatcgggtaatggcaccaatataataaatgataaagttaaaattccaaccggtgcttttcagtctaaacaaatgcaaactgaaaattgcaaagtaaataatcagatgttggataaaactgaagtaacaaattctactaaaaattcttctacactaaatgtggaaaattccaagactgctgatttgtcgagatttgattactctttatatacaaaaaaagtaaagagttttgaatttagaaattcagataataacgatgtaattagaacagtaatattaaacaaacctaccggtgttgaaactgtaactatgactttgaatgttagctgcttaaaagggagaaagcatcagcatcgatcgcacacatctactagatcgagtatttataattataaacctcaagttattgctgaagtaaatacatccaataatccattgccaaaaatatcaattttggagaaaaacgttttaccaaaaactttttttcaagtagataagaatacatttcttactcaacaggataaagagaactatgagaaatttatatcagttaataagaatgatattagcatagaattaccagctttttccattaatgatattgatattccaggctattcttatcatattaatgcaaaaaagactactcctggagcaggattaggtaaagaaaagttttacatctacactgaatcaccacaaacagttgttatcgactataccccgattacggttaaggttgaacataagatcatcacggtaacaccaaccgatccgaagacaccaagcgataagcttccagacaatcctggcaagaactatccaaagggtgttgataagaaagatctgaacaagactgttaagcggacgattactgttaataaaccagctggctcaactgttgatgctagtcaagagactactctaactcggacggctactgttgacgaggttacaggccaagttacgtatggcaaatggacaacctcaaagcttgataagtataatgcaccagaaattccaggttacactccaagtcaagcagaagtccctgcagttgatcaggtaacggttgattacacagatccaaaaattgaaattacctacacgccaaccgaacagactgggaagatcacatacgttgatccaaacggcaaagaagttggtactaccccattaacaggaaagacggatgaagagattccagttacaccaaacgttcctgcaggttggcagattgttcctgatccaaagattccaacaaagatcaccgctactccagacggcattcaaacagttacggttaaggttgaacataagatcatcacggtaacaccaaccgatccgaagacaccaagcgataagcttccagacaatcctggcaagaactatccaaagggtgttgataagaaagatctgaacaagactgttaagcggacgattactgttaataaaccagctggctcaactgttgatgctagtcaagagactactctaactcggacggctactgttgacgaggttacaggccaagttacgtatggcaaatggacaacctcaaagcttgataagtataatgcaccagaaattccaggttacactccaagtcaagcagaagtccctgcagttgatcaggtaacggttgattacacagatccaaaaattgaaattacctacacgccaaccgaacagactgggaagatcacatacgttgatccaaacggcaaagaagttggtactaccccattaacaggaaagacggatgaagagattccagttacaccaaacgttcctgcaggttggcagattgttcctgatccaaagattccaacaaagatcaccgctactccagacggcattcaaacagttacggttaaggttgaacataagatcatcacggtaacaccaaccgatccgaagacaccaagcgataagcttccagacaatcctggcaagaactatccaaagggtgttgataagaaagatctgaacaagactgttaagcggacgattactgttaataaaccagctggctcaactgttgatgctagtcaagagactactctaactcggacggctactgttgacgaggttacaggccaagttacgtatggcaaatggacaacctcaaagcttgataagtataatgcaccagaaattccaggttacactccaagtcaagcagaagtccctgcagttgatcaggtaacggttgattacacagatccaaaaattgaaattacctacacgccaaccgaacagactgggaagatcacatacgttgatccaaacggcaaagaagttggtactaccccattaacaggaaagacggatgaagagattccagttacaccaaacgttcctgcaggttggcagattgttcctgatccaaagattccaacaaagatcaccgctactccagacggcattcaaacagttacggttaaggttgaacataagatcatcacggtaacaccaaccgatccgaagacaccaagcgataagcttccagacaatcctggcaagaactatccaaagggtgttgataagaaagatctgaacaagactgttaagcggacgattactgttaataaaccagctggctcaactgttgatgctagtcaagagactactctaactcggacggctactgttgacgaggttacaggccaagttacgtatggcaaatggacaacctcaaagcttgataagtataatgcaccagaaattccaggttacactccaagtcaagcagaagtccctgcagttgatcaggtaacggttgattacacagatccaaaaattgaaattacctacacgccaaccgaacagactgggaagatcacatacgttgatccaaacggcaaagaagttggtactaccccattaacaggaaagacggatgaagagattccagttacaccaaacgttcctgcaggttggcagattgttcctgatccaaagattccaacaaagatcaccgctactccagacggcattcaaacagttacggttaaggttgaacataagatcatcacggtaacaccaaccgatccgaagacaccaagcgataagcttccagacaatcctggcaagaactatccaaagggtgttgataagaaagatctgaacaagactgttaagcggacgattacgtctcaaccaacgacagctaaggataaccaactaccacaaactggtaatgacaatagcttaacattaatgggcttaggtgcctccaccttattgggaatgtttggccttgctgctgtaaacaagaagcgtaagtaatcaaattagctctacaattttatccctttgtcagtactgatgaggtattttgatgaggttagtttaagtagcgaagctgcttgagctgaccttttcttttagcttagtttttaccatgagatttgagagctagtagacttcggatacgggaatgatcaaagttgcgaaaaccataagctgttattctagtggtcttaattttattattgtaagcagtcgttatcaatacgggttgaacaaagggactctacaattgtaagtactgatgaatttaacatcagtgcttattttggttttctacgaatagtcaaggatattaaaggaattccttggaatttagctggatagaaaagttaattaaataattaaaatggctcaaagttaaatttaaagtataacaaaacaagctcatgaactagatttattgaacctgtcaaatcttttgtgtaaatagttctttctcgtaaattgatttttgaattatttattcaaaataagattctaaggtatcctgaacctgaccaaagcctttatgaattcggttgaaatagcggtcattgtagctcattgcctggatgccaataaatgcatcaagcgactgttcagttggaaattctgccttaggcttagctttacgcttgatgacgttgttaaaggattcaatcatattggttgaataaattgaagctctgatttgtttgggataattgtagaagaccagcagatcgggctcaatttccttcaaacctttgatgacattgctataagctttattccatctggcatagaatttgtgcaagacagctgcagcttctttttggcttgtctgttgatgtatctgcttgaattcgttcatgatcttttcgcggtcatccacccggactttagcacagatattgcgcatgacatgaaccaggcagcgttgaaaatgagctttaggataagtcctggccaaggctgttttcatgccaacaacaccatcagaaagaaagagttcaacttgcttcaagcctctggacttcatgttttgaagcatctctgtccagacttcaatgttctcactaggagcaatgcagtagtcaatgacttccttatgtccattaggtttaatgccaatggcaatatatactgcttcacgctcaaacgtttctcggcgcaaaggaaggtatgtcgcatccaaatagacacagaaaaacttgtcgcttagcttgcgcttgtgataagcctcaaccttggggagcatctgcttggaaatatttgatacttgagctggactataatgactgccatacattttctcaatcaagtcagcgatttctctggtagttacgcctttggagtagagcttgataatcgtgctttccaaaacatcagagtgctgcttgtagtcaggcagcgtgtgctgatgaaactgaccgttgcggtctcgaggcacttgcacttcaattggtccaaactgggtatcaaccttgcggaaataagcaccatttctagaattgccagtattccagccatttctggcatagggatcatagcctagaaaggcagtcaactcagcttctagcaagttattaacagcctgttgtagctctttgcgcaataaatcatttattttgtctggattgaatagagcttgagcaaaatctttggtaaaatcattcatgaaggagttcttctttctgtatgtgtttttttgttcaaaccaatcatacgagaaaggaactcctttttctaatgtttaaagaaataaatttaaggaatcattcatccttacacaaactattttacagtctctccaaagagtttaagcagcgaactattgaacaagcaatctttggcaataaaccatacttacagctgcctttggaactggggtttaaaagtattggcatgcttaacaattggattagagaatataagaaaaacgggtataatgtcattatcaaacagaaaggacgccctgcccgtgaccaaagaaaagcagaaatctcgcaaggaactggagaaagagatccagcagctgaaagaagaaaacttgcgattgcgtattgtgaacgaatacgtaaaaaaactaagtgccttggatcaagaagatcagaagaaatagctagggtgattacggatctaaggcaagaattcaaagttagtttaaattatgtattagctgcgattgcagagcaccctgagctacctataattgccagaagctcatactacaagattatcaaacgacagcccgtcaagcctaaacggtcaaagcttattgctagaatccatgagatttttaatcatcatcaaggccgctatggatatcgcagagtagctttgcagttaatcagagagggctggaaagttacggagaaaaccgttcgctattggatgcataaattaggtcttaaaggcatcaggtgcaataagcgcaaatattcaagctataaaggtactattggcaaaatagctccaaatttaattcatcgtgatttcttcgcagccctgcctaacacaaaatggtatactgatatcactgaatttcatcttaataatgaaaagctttatttatcgcctattctagacggctgcggtggcgatatagtttcttatactatctccaaacatccagatatggatttagtaatgacaatgcttgacaaggcttttgccaaagaaacagctcttaataactgcatttttgatactgatcagggctgtcagtatcaaagccctcgttatcagcgagctttaaaactccatggtattactcaaagcatgtccagaaagagcaactccatggatgatgggctaatggagaacttctttggcctgctcaaaactgaaatgttctatgatcaagaatacaagtatcataatcttcaagaattaactcaagcaatcgaggaatatatcgaatactataacaacgaaaggataaagagcagattaaaaggcttaaccccgaaagagtatcgaagtcaagcctctattaatccaatattttaattgtctactttttacgtctcagtacagtgaaactgtcaaatcttttgtgtaaatagatctttctcgtaaattgattttttaattatttatttaatcaaagtaggattctaaggtgtcctgaacctgaccaaagcctttatgaattcgattgaaataacggtcattgtagctcattgcctgaatgccaataaaagcatcaagcgactgttcagttggaaactctgccttaggcttagctttgcgcttgatcacattgttaaatgattcaatcatgttagtcgaataaattgaagctctgatctgcttgggatagttataaaagaccagcagatctggttctatgtctttcaagcttctgataacatggctgtaaaccttgccccatttggtatagaagtcatgcaggacagctgtggcttcttctttgtttgtctgttgatgcacctgtttgaattcgttcatgatcttttcacgatcgtcgacgcgtactttagcgcagatattgcgcatgacatgaaccaaacagcgttgaaaatgagctttaggataagtcctggccaaggctgttttcatgccaacaacaccatcagaaagaaaaagctcaacttgctttaagcctcgggatttcatgttttgaagcatatctgtccagacttcaatgttctcgctaggcgcaatgcagtagtcaatgacctccttgtgcccattaggcttgatgccaatggcaatatagactgcttcacgctcaaatgtttctcggcgcaaaggaaggtatgtcgcatccaaatagacgcagaaaaacttgtcgcttagcttgcgtttgtggtaagcctcaacctttggaatcatctgcttggaaatatttgatacctgagctggactgtaatggctgccatacatcttttcaattagatcggctatttccctggtggtcacgcccttggagtaaagcttgataatcatgctttccaagatatccgagtgctgcttgtagtcaggcagcgtgtgctgatgaaattgaccgttgcgatcccgaggcacttgcacttcaattgggccaaattgcgtatcaactttgcggaaataagcaccatttctagagttgccagtattccagccatttctggcatagggatcatagcccagaaaggcagtcaattcagcttctaacaagttattaacagcctgttgtagctctttgcgcaataaatcatttattttgtctggattgaatagagcttgagcaaaatctttggtaaaatcattcatgaaggagttcttctttctgtatgtgtttttttgttcaaaccaatcatacgagaaaggaactcctttttctaatgtttaaagaaataaatttaaggaatcattcatccttacacaaactattttacagtctcgtacagtgctttcgaggcttttcttttatattattttttcttagaaatagagtcacggatatttaattgactatggcaagtgatcgtaagtggaatttgaatatcttccgtaattagatctttagccaaacgaacggcagtcttgcccatttcttcagtattcatatagacactggatagggtaggagttaagaagcgattgatatctacatcatcaaaactaacaacagagatatcgtcagggatgttaacacctgcatcactaaaggctttataaacacctaatgccataggatcactaccgacaacaacagcagtaggacgttgttgcagttttaagatctcttttccagcttcaaaagcagagttagttgaccaatcagtaataaaagaatggcagtactggtcaagattgtggagtttcatccaggacaagtaagtgagttcacgtagatcatttttttcacaagcaatcttaccgtcaagatcaagaaccaatgattttccaccgatgtaaacaatgttcttgtgtcccaggttatagagggtatcaagaatatgagaagtttcttccacaaaatcattacgaacgatattacaattatgaatattggtgttgacgtcgataaaaattatatggggattaatgctttgaatctgcttaattgctacaggtgtcatttcaccctcgattagcactgcgccaaatttagctaagtcagcccaatttttattatcatcttctattctaaaaggttgctcaatacgtaaatgccatttcttggcttcttcattaatgcctttatgcagattgagaaaatagggatcggtgatttcacgagatttgttataacgcatgattagtgcaatcgagagctggttatcagtttgcttgggaccaggatgtttttgagatttcgaataatgcaggcgtttggcggtttcgataacgcgggcacgactagcctcattgattctaaaagttggatcattgtttaaaattcgtgatacgctagctggcgataccccagcaatacgtgcaatgtctctaatacttgccataaagatgctccttgtttgtttactgtttacattatacaacttttagcaagaaactggtgtataccaaacttgaggataatagtttagtgtccataaagtaagtcatattgaatcaatgttacttactttatggacactaaatttacttattttactacactacatagtaaagtgtagtaaaataagtaaaaaagcaattgaaaaagaagaatatggaaataataaaatcttaataatttgttcgcttgtttttatatttgtaattcattaaacttatgttcgaaataatgaaaggagaaatatatttttcaattgtaggtaatataattccatattcgtatattgacagtacttatgaaacaaaaatcattgattagtcaactagcaaaaatacataacggtacaattactcatcgtgaattagcattaaatggagtatcaagttatagtatttcgaaagctgttcaggatggtacgttagaaaaaatacgtccgggaatttatttatttggtgatgataccgaggatatattttatagtttgcaacaaaaatataaaaaaggaatctattctttagaaacagcattatatttatgggggttaagtgatcaatatccttttagcttagatatgacttttcctaggggctacaataatccaactttggatattgaaataaatccacatattcaaactaaaagtttggctactcagggaataactcaaactgaatcattcaatggaaatgtgattaatctctatactcctgaaagaactctagctgaaatattgcgaccgattaatgctgtagatatcgaaataattaccaatgccttcaagatgtggaataaggaaaagaaaaaagacataaatacattaatgtcttttgcagaaaagtttagggtaactagaaaggtaaatagctacttagaggtgttgttgtgaaaaattatgttgatgagaagcagttcaaagcagatgtaagaaggtatgctagagagcataatataaaaggaaatgagattggtcgattatggcaagaaattatgttagatgatttgctagaaagaatttcagtatcaaaatatcgagataatttcattttaaaaggtggttttttgttgtcggctattgttggtatcgataaaagatccacggaagacattgatgctgagataaaaggattagatttgaccgaaaaacaaatagctaaagtatttgaagaaatctgtcaaataaaattagcgggggatctattaagcatttcgttgtcagaaattgaacagattcatgagcatgaagagtacaagggctatcgattacattttaatgcttcttttcggaagataagatatccattaaaagtagatgtttcaacaggggatgttattacacctagggagattgaatatagctataaattacatttagaagatcgacatattaatatttgggcatatactatggaaactatagtagcggaaaaattagaaacggtaattacgagaggaatagctaatacacgtatgaaagatctctatgatttattcatactgcagagagaacgaatcaatttagctactttaaagtcagcttttgctaatactacgaattaccgtgaatcaatcttttggacaggacaagatatagattataagtattgtctaagacaagtagatattattgctgaaaatagtaatatgcagaatctttggaatagatacgtgagaaaacatccttttgctaagggaatcacttttactcaagttattcaggcagttcaaacttggctaactaaattagagtttgaaaaataatttcaatcaaaaatgacgctagttgatcgaaccagcgtcatttttttagataatagatgtagaaaatagtttgaaaaacgattagtttttatagaaatctttattatactttacttgtcttcgtagccctttgggtgactcttgtgccagttccaagcagttgcgataacgtcatcaacactttcatgctttggcttccagcccaaaatagttcttgctttggttgaatcagcaaccaaagagtcagggtcaccgccacgacgtggacccattgtgtaaggaatatcaatccctgttacttttttagcagcgttcaaaatttcaaggttggagtaaccttgagcagtacccaagttaaagacatctgacttattagtctccatcatatgtttcagtgccaaaatatgagcatcaattaaatcttcaacttgaacgtagtcacgaacgttggtaccgtccttagtgtcatagtcatcaccaaagatagtaaacttaccatccccagaaattgcactcttcaaaatatttggaatcaagtgtgtttctggtgcgtgatcttcaccgattgtgccatcacttgcagcaccagcaacgttgaagtagcgaagagcagtgtacttaataccatcagctttatcagcccaagccatgatcttttccatcatcatcttggtttcaccatatgggttgattggatcaagtggggtgtcttcggtgattggcaatttcttaggaataccataagttgcagcacttgaagagaagactaagtatttaacaccagcgtcattcatagcttgtaataatgaaatcatgccagtaacgttattgtcatagtacttaagtggctttttaactgactctggaactaatgaatatgctgcaaagtgcattacagcatcaatcttttcatcacgtaaaattttgcttaccaaaaaagtatcttcaatatcgccttggtaaaacttagccttaggatctacagcctttctgtgaccagtatataaagcatctaagacaacaacatcattgccttctttaactaattcgcgtacagcgtgtgagccgatataacccgcaccaccgacaactaaaactttcatgttttgcgctcctttattttagttattatcttttattgaaatcgattacattataacacatattttagtaaataatttacttattttagataaattatttaaaaacactaatttagtctaaatgaaaattcatgatcttgacttgggtcgatttgatattgatcttcaacatctgtaccccagctatcgatgccacctacaccgcgaacggcacctgcgattactaaaactgttctccgggcaagaggcaattcttcaatatgcgttgcattttctagttcttctgctgtgtagggaaggcaactgaagttgaatggcttatcagtttgctcaacggtgaggtcaaaatcctcattagaatgatcagcattgttgagcgtagtatttctagtgattttgagttgatgcgtttgcatgtgcatcccattttcctgtggcactaggtatttggttactggcaatcccttaattttaaaagagccagcactggctccagccatccgatcaggataagtctcaccagataagccttcatattcaaagccactagctagagttggtatgataaagcgcattccaattactggaagcggtggtaaatcttttttaccaaaataacgcatcttaattataacatgaccattattgttaatttggtaagtaatttcaacttttgtttttggaatagttaaagtttcataaataaaagtaatttcgactttacttgcgtactcatgattagaaaattggttgttgagtggagcgattggcaaatctgcaaaatcatgttgatcaactttgagctgaatttcagtacagtggctaaacatatcggcgccgagccattgagctgcttttaagttgaaaccgttgccgcgatcgttatcagtagttgcacgccaaaaggttggggtaggaacgcgataaaaccattctttacccttaatttttaaagactctaagccacctttttcatagctgaaaatatattgcttatctggggtattaatgcctaaagtagcatccccatagattatatgtaaattatttgtgtaagccatagtagtatttaacctcctgcattgctggttttggtgtacgatcggcgaacattaagccatcgcctgaaaattcataatcagagtgtcggtcgtcaaagtcgccgccataccgtaatacttcttggccactcaccggatcgtgtactaatagcgcttggtcgatgaagtcccaaataaagccgcctaaatattgtgggtattggtcaagcaatttaatgtaggaacccatgccaccatcagaattacccatatcatgcatatattcgcattctaaaaatggcttttgaggcttatttttaagatattcttcaacatcttttggtggtaaatacatccagctttcaagatcagaaatcttgtcctttaattctggcgtatgaaccacgccttcatagtgggtcaggcgactatgatcgtgtgctttataaaatttattcatagccgcaatgttttctccggcatatgattcattgccaagagaccagaagagaatggcggtatggttttttaaagtttcataattgttgcgggcacggtcaattacagcttcacgccattcaggaatagaaccgggaacattatctgaaggttcaacttgtcccatcttttgccaagtaccatgtgattcgagattattttcagccatgacatagattccattttgatcgcagagatagtaccacggaatctgattaggataatggcaagttctaaccgcattgatgttattttctttaaaagcatgtatatcttgtttcatatcagttaaagtgatgctgcggccacgcttcatattccattcatgccgattgaccccattaataattagacgttgaccatttaataaaacaaccttgtcagaattaatttcgatttttctaaagccgaattggtaaggaattagttcaagtaaatcaccattttcagcgtgaacttcaataattagttggtacaaatatgggtcatggttatcccaaagatgcacatttttgaataattctttttcaatttttatggttaagctgattggtgcttttttctcaagtagagttttgccattaatatcttctacgaacaagtgaactgagccagtatttttgcctgtaaagtgcaattgagcattaaagattccatcttggtaattatttgtaacttctggttttaaatcgagatcggttaaatgcgtctcaggtaggccgagcaattcaactgaacgaaaaatgccagaaaaacggaacatatcctggtcttccaagaaagaggcagtgctatgtttgaaaacttcaactgctaaaatattgtttttgtttttaatgtaaggtgttagatcaaattctgaaggagtgaaactatcttcggcgtaaccaacaaaatgaccattgagccaaacatacattgctcgctcaactccttcaaaaacaatgtgaacattacgacctcgcaaagtggaatttaagtcaaaatgcttaatgtaagagccaactgtgttatctgcacctttgctaaaagagtcggtagctttttggttgattgtgtaagcaggtcgacgataaatttttccttcccacggaaagagcgtattaatatattgattttgagcgtaattatttagctcaatttcacttgggactggaatgtgatcaaatgatgaagaatcgaaatctgttttaaagaaatcaacgggtcgtgtttgtggattagctgaaaacttaaaacaccagtcaccatttaaactttgaacaaaactactagtttgcttttgccattcgcgatagttcttgaaatagggatgatcgctgtgggcaggaacttgattaacgcggaaaacttcggggtcatcaagccagctaagatttgctttcatgaaaatacctgatttctataaaaaaattaaccttgaaaacgcttatattataacacatagataataaatttacttaataagtaaattatttactgaaaaatattttgaagattaatatttttgactcgaaaacgaatgacaaagtgcttatgatatttattggaattacgtaaatattttgtataataaagttaaaaattatttatttaagatagaaaagatataaatatgacaacaattaaagaaatagcacaagaatcagggtattcttcagctacggtttcgcgcttattaaataatgatcctaatttgtcaattacggctgatactaagaacaagattttagaaattgccaataaattgggctattggaaggatcatcaggaaaagaagatccgtccaacaattgcgttactataccgagtaaatcatgaagagcaactgcaagatgaatattttacttcattaaagcaagcgctgatttcaacagtagaagcagagtcgctgcagatgaagactttttatgatgcagatgatttgattaaacatgcatcactttttcagggctttatcggagttggcgcggcgccaattgaaaatgcaacactaaaaaaactccatgaggttttgcctaatggggtctttgtcgatactaatccagccccggaattatttgattccattcgcccaaatttaacgctgacagtaaaaaatgcaattgatctttttcttgataaaggatatcagcgcattggttttataggtggcattgggcctaagcatgatcatattcaagaagtagatgtacgtgccaccgcttttgcggagtatatcaaggtgagaggcaaaagtgatgaattgatgtttgttaatggcccgtttagcgttgctaatggctataagttgggaaaagaggtactggctaaatgcaaaaataaattgcctgatgcatttttaattgcttcggatactttggcagttggagttttgcaagcttttaatgagaacaatgttaatgtgccaaaagatactgcaattttaagtattaataatagtaatgtggttaagtatgtttcaccgccactttcttcttataatattgatcaacaagagatgattgatatggcattaaatatgctaacgaatctgattattcaacctaatcgggcacacattgatgtaaatatgaatactaatttagttgtgcgcaagagttttgtgcctaagaagtaaattaattagtaaataaaaatattttttagtaatactatcaaaagagaatgctaatttaatgcgttctctttttgtttagctttcagtaaagaatttattaaatataaataaattctttacttaacaaaaatagagaatatactaaactgtgtaaacgattacaattaatgattgctttagggggcaaatttatgacacacagtgacaagtcagggaagcagattctttcctacgcatcattctgtttgggtaacttaggtcactcggctttttatggtgtgatgagtacatattttattatttttattactagcagcatgttcagcggacttaatcagtccgttgcagataagctgatcggcttaattacaggattgatggttgtaattagaattgctgaattggtaattgatcctattctaggaaatatagttgataatactaaaactagatggggcaaattcaaaccttggattttaattggtactttagtaagtgccgccttattattagttttgtttactggcatttttggattagcacaaaaaagttggattctctttgcgattttatttgtactaatttatatcagttttgatgtattttattcattatctgatgtttcttattggggcatggtaccagctttaagtgaagattcacatgcacgtggtatttatacttctttaggtgccttttcaggaacaattggttggaacggattaacaattattgttgttccattagttacagctgtgacttatgcggtaactggtaaacatgaggaaggtgcaccaggttggttagcatttgcggcagtaatttcagctttggcaattgtatgtgccttgattgtttgtttcggtactaaagaaaagcataatattattagaaactcagctaagcaaaagactactttacgtcaagtattcggtgctattttccataacgatcagattttatggccaagtttagcatacttgctttactcattagcatatgtaattaccaatggtgttttgttctatatgtataaattcgttattggtaagccaaatgacttctgggtagttggtgttattgcaacaattatcggtttctgtattagtccaatgttcccaattctgaacaaatacattccaagaaaatggttattcatcgctggacaaacttgcatggttttagcttatgttttgtttattttcggcagagacaacgtatttttgatggacttgggcttggttcttttaaacattaactttgctcaattggtaactgttttaacattaactgacgcaattgaatatggacaacttaagaatggtcaaagaaatgaagctgttgttttagctgttcggccgatgattgataagtttaccggtgcggtttctaatgctttagttggttatattgcaattgctgctgggatgaccggttctgcaactgctgcagacatgactgctcatgatattagcacctttaatatggtggcattatatatcccacttgctttggcagtcttatcaatcgtagtctttttgactaaggtaactttatctgaaaagaaacatgccgaagtggttgaagaattaaaagatcaacttgcagaaggtaagattgaaaagaatgaatctaatactcaagttagacctcaagatcagactatctatgctcctgcagacggtaagttaatgaagatggcagaagtaattgacgaagatggtaagccattcccaggaaagggttttgcaattaaaccagattcaggcaatatttatgctccatttgatggtgtagttaggttcacttttggtactaagcatgcttttgaaattgtttcaaataatggtttacaagtagttgttcatgtcggcttaggtacagttaacttgcgcggtgaaggttttgaaacttattatgatgatggtcaaaaggtaaaaaaaggtgacttgctgttagagtttgatcgtaatttagctcttaagaatggctatcaggacactgtagttaccttctatacacaaccaggacgaattgtaaaatctagtgaaattgaagctggtaagattgttgagcatggtgaaaaagtattagatgtacaatttaagtagaggaattacaatgacacagttaaaacgttttttatatggtggggactataacccagatcaatggccagaagacacttggtcagaagatattaaagtttttaaaaaagcggatttaaattctgctacaattaatgttttttcttggagtttgcttgagtcaagagaaggccaatatgatttttcaaaattagatagaattattcaagaattgtctgatgcaaattttgatattgtacttgctacttctactgctgcgatgccagcttggatgtttaaaaaatatcctgatgtagcacgagttgattatcaaggacggcggcatgtctttggcgcacgacataacttttgccccaatagtaagaattatcaagttttagctagtaaattagtcgagaaaattgccgaaagatatagtaataaacctcatattgctgtttggcatgtgaataatgaatatggcggcaattgctactgtgaaaattgtcaaaatgcttttcgtacttggctcaagagtaaatatcaaacactagataacctgaatgaggcctggaatatgaatgtgtggagccatactattcatgattgggatcagattgttgttcctaatgagttaggagacgcctggggaccagaaggtagcgaaaccattgttgccggtttatcaattgattatttacgttttcaatctgatagtttacaaaatctttttcagatggaaaaatcaattattaaaaagtatgatactaacactcctgtaactactaatttccatggtttaccaaataagatggttgattatcaaaaatgggctaaagatcaagatattatttcttatgattcttacccaacctacgatgcacctaagtatttaccagcatttttgtatgacttaatgcgtagtttaaagcatcagccatttatgttgatggaatctgcaccgtctcaagtcaattggcaaccatatagcccgctgaaaagaccagggcagatggcagccacggaattgcaagcagttgctcatggtgcagatacggttcagtttttccaattaaaacaagcagtaggcggctcagaaaagttccatagtgccgtaattgcccactcacaaagaaccgacacgagggtctttcatgaactagaagatttgggtaaaaaattaaaaaagattggcccaactgttttaggctctaaaactaaggctagagctgctattgtatttgattgggataacttctggtcatatgagtacgttgacggtattagtcaagattttaattatatggaatcaatcttagattattatcgccaattttatgaacgcaatattccgacagatgtaattagtgtcgatgatgattttagtcaatatgatttagtagttgctcctgttttatatatggttaaagcagggctaagcaaaaaaattaatgcttatgtcaaaaatggtggcaactttgtcactacctatatgtctggaatggttaacaatagtgataatgtctatcttggtggctatcctggcccgttaaaagacgttatgggtatttgggttgaagaaagtgatgcaattgtaccaggacataagacaattgtttcactaaatggcaaggattataaagcgggtttggtttgtgacttgattcatccagaaaatgcaaaagttttagcaaagtactccaatgagttttatgcaggaacggctgcagtcacggaaaataaatatggtcaaggtaaggcctggtatgttggtactaagttggatcacattgggttgacgcagctattcaaccatattgttttgacagctaacgttgaatcattggtgggcgacagtcataagttagaagttactaagcgagttactcagtctgggcaagaattatactttgttttaaatatgagtaatgaagaaagaaaattgccacaaaaatttgtagagtatcaaaatattttaactggtcagcaagctcatgatcaaatgaaggcatgggatgtacaaatacttgttaaataaatgattttttccttaatgaagacaagaagttagacaaacgatctagcttcttgtttttttacttaaataaatattttatttatttaagtaaactatttactaaaagataatgaagagatatactaataactgaaaacgattacagaataaatttgaggtaaaaacaatgaataaggaagaattacttaaagaatatgagacaacttttggtgaaaaaggtaaggatgtctttttctcacctggtcgaatcaacgtgatcggtgaacacactgactacaatggtggtcatgttttcccagctgcaattagtttgggtgtttatggtgtttacggcccaagagaggataaaaaagtttgcttgttttctggcaatgttgatggcgatatcgtggaattcgatattgacgacacaactgttgagaaagatgatcgcttttgggctaactacttcaagggcatgattacgtacttacgtgaaaaatatgacaacattgatcatggttttaatctttatatcaaagccaatttaccatcaggttcagggctatcatcaagtgctgccattgaaatgctaatgggcatcattttaaaggatgaatttaacttagatgttgaccggattgctttagccaagatgggtcaaagaacagagaatgaatttgttggcttgaattcagggattatggatcaatttgcctgcattatgggtaaaaaagatagtgctatcttcctcgattgcaatacattagattatgagtataagccactcgctttaggcgattacgaaattattattatggcaactaacaagccacataccttagccgattctgcttataatgatcgtgttcgtgaatgtcatgatgcagtgaagaagttgcaggctaagttagatattaagactttaggtgagcttgataatgatacttttgatgaatatgcatatctgattaataatgaaactgaaattaagcgtgctcgtcatgctgttagtgaaaaccaaagaactttgcgggcaacaaaggccatgcaaaatggagatttggaaaaattgggacgtttgattgatgcttcacacgtttcacttcattacgattatgaagtaactggtcaagaactagatactttagctgaagcttcatgggctcaacctggcgtcttgggtgcaagaatgattggcggtggcttcggtggtagtgccattgcaatcgtcaagaaagaccaagctgaggcatttaagaaaaatgttggcaagatttaccgcgacaagatcggttacgatgccagcttctatgatgcggaaattgttgatggaactaagagaatttaatcagacaagaggataagtatgaaagttattgaaaaatttgcggatgaagttattaatagtggagcgtatgagccgctcgatcgcgtatatgtgattaacaaaattcgcgctttagttggcgatgaggcaagtagcgttgaagctaatgatgaacaaacttcagttaagcaattagttgatttagccgtgcaaaataaaaagatttcggatgatgttacttcacgtgaagttttgaatgatcaactatacgacttgataacgccaacaccatctaaaactaatggcatcttttggcaaaaaatgcaaaaatcacctgaaaaagcaacagattggttttataaactttgcgaaaacaacaattatgtcaaaaaggaagcaattgccaagaatgttgtattctcagggaccagctctaaaggacatggcttagaaattacaattaatttgtccaaaccggaaaaggatcctaaggcaattgcggcagcagctcatgcaactggtaagaaatatcctcaatgtgcactttgcctagaaaacgagggttaccttggtggatatggcaaaaatgctcgttcaaatttgagaattattcgcatgaatattggtggccgcccttggggatttcagtattcaccatatgcttacttcaatgaacattgtattttcttagatcaaaagcatattccaatggtcatcaaccaacaaactttgattaatttggttgaaattgaaaagacgttaccacattattttgttggttcaaatgctgacttgccaattgttggtgggtcaatgttagcacatgaacactatcaaggcggacgtcatacttttccaatgatgaaagctaagattaagaaaaatgtagtctttgatgattatcctgaagtggttgctggcattgttgattggccaatgagcgacttgcgcttgattagcgataattcgttagatttgattgaattgggcgctaaaattattaatttctgggatcattattcagattctgctcgtcaaattaaggcttttgatggtaaaacacgtcatcatactgtgactccaattatgcaccgtgaaggcaagaacttcgtacttgatctagttttgcgtgacaacaacactagtgaaaattatccgttaggtattttccacccacataaagaattgtggcatattaaaaaggaaaatattggcttgatcgaagtaatgggccgtgctattttgccaggtcggttaaagagtgaacttgaagaagttaaaaaatactggttgggccaagataataagatggctattagccacaaagaatgggccgatcaaattaaagcagagcagaatattactgccgagaatgttgacgctgtgatgcagcaagctttagttgaagtctttgaacaagtattgcaagatgctggtgttttcaagaataatgcagatggcgatgaaggctgggataagttcattaccgctttaactaagcagatttaactcatcaatgtttaaaacgagatctgtttgatctcgtttttttgttagcggtaactcatatattctgatggttaaataatttataatatttatgaaagcgaatacaaaagaagggcaagagtatgaagacaagttttagaaaatatggcagaaaagataataaagatctttgtgaaatcacactagagaatgatcacggtatggtagttaaggtattgaactatggtgctacattggaaaaggtgttgcttgatggtgagaatatgattttgtcactggataagccagaagattacgacaaggagcgtaattatctaggcggtacggttggacgtattgccggaagagtgagacgaggtttatggcggcacggcttagaattacatcaattaccaatcaatgaagggcctaaccacattcatggtggtattgggactgatactgaaatttggaattttagacctagttgtaatgaaaaaggtgctcgtgttgatttaacactttttgatccagatgggcataatgcttatcctggtaatttaaaattacacgctcgttatgagttagataataacaatattctgcattattcattgggtgccatgagtgataagctgactatttttaatccggttaaccatactttcttcacattaggtgaaaagaaaatgattaatgacttgcaactgcaaatgaatgctgattattatattccagttgatgagactggcttgcctgatcgtggtatggaaaaagctgatggaacagcattcgattttagaaagaagaagcgagttggggatgcattggaagctgatgatccgcaaattaagaaccgcgatggaatggatcatccatttatcttggatggcaatatgccaactgcagtgctaacttctgctaaacacaagttaacggtaacgactaatgcgccatctctgattctgtacactggtaatggctttgaccacactggcaagtatacagctgactttggtccgtattgcgggattacttttgaagcacaagtgccgccagcagaaggtgatgatttgggacgcatcacgcttttgccaggtgaaaaatttaagcggactgttgattggaaatttgaataaaaatatggagaacatccttactgaatgaattggtagggatgtttccttctttggatattatgatttgattttacaagtaaatccatattaatatttaaaatatttagaaatcaactgaaaggtatagtaaaaatgatgacaaacgaaaagattattgctttagtcaaggaagaatatctaaacaagattccaaaaatttttcgcaagcatgctgttgaaggcacttgcaagttaatcgctagagaacatcccgatttatacaaggcttttgaagatggtgaaccaaccgcagaagaaaaacaacaaatgacagagttgattaacgggattttcgaacagagaatgaaaaagcataagatgttataaaaagacgctggaatgtatgattattagatcgctacattctagcgtttttttgattttaattttgatttattaaactaacaggtagcgtataaacactttctaatgaaacagagggatcattaatttgacgtaaaagtaaatcgcacattaattcagcaatttcttttgtatgttgccgagcactaattaaatttggaaaaagactttgaatcaaatgactaccatcaaatcctgtgattaaaggtacttttcctaaataatcagcacattctttagctagtaaagctgtaatgtcatcggtacaacaaattgcatcatatttgtcatcctttaaaaattgaaggatggctatttttttagcaataattgagtcactggcactgagtgagcgaagatcgaatttagaatcaaaagtgttaaatacgcgaatcattcctttgattcgatcacttattgggtaatagtcttctttagcaccagcaataataataattttctttttcttttgttttagaacagattgtgcgatttgcatacctgcgtcatagttattagattgaacagttggtatttgaggactaattttacggtcaaagctaacaataggaaactttatttttagtccttttttaggaatcttaataggagagctggtgatcagtccagcgatttccttttgtttaaatcgctctaaatagtaattaatatcttgggattgatagtgatctagatgaagaatacaatcgtatcctttttcctgtaaataaaaggctagatattcaaataattcagaataaaaaggatcccggatttaaaattgaagtgcaacactaattgttaaacaaaaaggccatgaagacctaaacttgaagtgaccaaaaatcaagaaaggaagatcttcatgaccaactcaaattctagcatttccaagcattatcatcaattgaacagcgaacaacgtggacaaattcaagctctgcttgattctggcataacctcctgcactgctatcgctcaagaagtaggctgtcataaatcaactatcagccgtgaaattagacgaggcagtgtcctgcaaagagacagcagctatgtcttgtatgagcactattacgctgatactgcacaaatttatcatgaaaagcgccgcagaaactgctataagtgtaatccactgcaacactatgccgtctttttcagaatgctaagcagacgctttaaagccaaatttgatgccaccagcattgatgaattcgttggtgaatttcacaggattatgccaaattatccatgtcctagcacgcccactgtctatcgttatattgatcaaggattgctggatataagcaatatcgacctgccaatgaagcttaaaagacgccgaaacaaacgccatcatagtcatggtggccatgctccgcataaaaagaatcttggcaattcgattgaacagcggcctaaagaagttgaaaacagaaaagtttccctgcactgggaaggcgatttggttaaaggcgtcagacgtaaaaatcaacctgccttaatgacactgactgaaagaaccactcgttttgaggttgttatcaaaattcctgactatcgggccagtacttgtcaaagactgcttcaaaaggagattgacagacatcctaattggtttaaatcaattacgtttgacaatggttctgagtttgcggatatgaccaaaatcaaaggatgtcagatctactttgctcatccatattctccttgggaaagaggcacaaatgagaactgcaatggacttctgcgtcaattcttccctaagggcaaaagcatgaaagataagtcagctgcttatgttcaacaggcaactgatgccattaaccgcaaacatcgtcgaatcctccaatatcacacagcagaagaactcttcaagcaatacgttccttcatagcctaactgttgcacttaatttgacaattcaggattattttttattaaatcaaaataaggaattatcaacggaagaattgcttaatcatgtttggaaaaatgatcttgatgccaatagcgaggtagtctggatctatgtttcatacttgcggcaaaaattgcaatcaattcaaagctcagttcgaattgaaggcgataaaggtggttcatataagctagttaagtaggtgagcagatgattcaaaaatttcggtggaagtttattggtacttctgttgctgccttgtttgtagttttgttgttgacgttaggcggcttagtttgggtgactcatgttcaaagccaaaatgaagtcgatcgcgtgctaacggctttggtcaaaaatgaagggcgcttgtcaccaaaaaatgccaaaccagcctttggcgatcaacatgatccaattaatcgcaattttttaggtgggcagtataatcccgaagcggtttatcagtatcgctattttgcggtaacaattgatgaaagccatcaggtacatgtaattaatgataataacgtttataaaattaataattccaagatacagactattaccagatcagctttagaaaatggtgataaaagtggtgtagttgccttaggacaaaatcaatatgcctttagggttgtaaaaaattctactggtgaaatgatgattgtttttttgaatgaaactctgatttttaaccgtttttggttattatttagagtagcgttagttttaggcttaggcgctttgattgtctttgctttagttttgattttagtttcgggcaaggcaattaagccaacgattgatgcttatcacaagcagcaggaatttattaccaatgccggtcatgaattaaaaacgccactagcagttatttccgcgaatacggaaatggaagaaatgctgggcaataattctgaatggaatgaaagcaataaagagcaggtggctaaactaactaagttaatcaatcggttgatttcgctggctcgagctggcgagacgggtgagcttaccttaagcaaagttagcttttcagaaatcgttgaagaaacgactaaagattttaaatcagtcatgaagaagaatgacttagtctaccaagtatcggtgcgggaaggcttaaatgttttagctgaaaagcatactttagccgaagtagttaatattttgctagataatgcgcaaaaatattgtgatcctcatggcaagattcaggtgaaactgactaagggcggaactttaagcaaatatgcggtcttgcgggtagaaaatacctatcgtgaaggtaaaggcaaagattacagccatttctttgatcgtttttatcgcgatgatgagtcgcataattctaagaaaggtggctttgggattggcctggctatggcgcaagagttagtcgaagcctttcatggcaaaattttagcccaccacaaaggtgaagacattgtttttactgttagtttaaaaattgctaaatgatcattctgtgatagttgtataattagaacagaattgggggatcattttggcgaagagaaaatcaatttataccaaagatgttgtcctggttatggcagcatctttcttttttatgtttagtacaatgtttgttaatcctttgattaatggatatgctaaagaattaggcgctagcagtgcttttgctggaatcattgtcgggattatgagtttagcagcaatgtttttgcgaccggtagctggcaatttaaccgataaattttctaaataccgcttatcgtttattggcggcgctttaatttttgtaggagtaatgggctacgttttgactccgtcaagtggttggcttttgctctttaggttaattaacggcaccggttatgtcctgtgcacagtttgtatgactacctggcttgcttttttagtgccgcgccaacacgttggtgaagcaatgggcttttatggcttaatgaatgctttggcaatggcgttagcaccagcagtttcaattaatatttatcaaaaaataggttatcgcacaagcttgctagcatcagctgtttctgctttattaatgattgtggccattcagtttgtgggtgatcatgctttgcctaaaaagcgagttcgaacgcagaagaagagtttcaaaattatccagtttaatgttttaccggtagcaattttgacaactttatttgctatcccgtattttgtaacacaggcagatattgtaacttatgtagaacaaaaacatctgactgtcgcagttgggtcatatttcttgatctatgcggttgttttgttgattattagagtaggactaaaaaggtattttgatacagtacgttttggcgtctggttttggctaagtctagtttcaacggctgcttatattatcttgctcgcaataatgaataatgattggcaaatggctttagcggcagctttaatggcatcaggctatgggatcatttattcagttttgcaatcaactgcgctgttgttagcaccgattgaagaacaaggcttagctagtgctaccttttattttggactagacattgcgatggcctttggcccaatgatcagtggtgtaattgattctgctttaccgatagaatggttctatccagtagaattagtcttagttccattgattttagtagtttatttcatttggcgtaagcgtttgaatggcgcaattgaccatcattagagggaaaatatgagcgaatatgtagttaaatctaagttagaagataaagaatggcaaattgccaaccaagtacgtgatcatgtttttgtttgtgatgatgttaaacatgatgcaggtcccaacccagttgagtatctatgtagtagtgttaattcatgtattgtaatgtcggcagggatgattactaaagcacatcaacttgatgttaaaaattttagggtagaaaaccaggcaaaaacggagaatctcggtcatggtaaatcagtagtaactgagatgaagatcaaggtcttctttgattcggcaatgactagagccgagaaggaagaatttttagctcatactttgcatgtttcaactgtttatcaaactattaaagcagctgtcaaaatttatgtggaattaggaaaataagcgatgagcgagccatattacaaacaagaataccagggtgaaagaaagttagatggtgaggccccagtttttagttttgatcaaattatgaaagaaacttttctgcgaccatttatctggaatgcaagaactaccagaagaagtttctggattggaatcgttattactgaagttataatttggattggtggaattattacatttttggcaactgttatgccagtttctcactatgagaatgattcagctgatatgataaatggttttgcttttaatggtgatcacgcttcgatgattgtcattatcggtatgattatttggggcttgatctatctttatttgaaattatgccaattaggcctagccgtaagaagattgcatgatatcaattatacaggttggtggattctgttaatgctgataccgttaggttggatttttgttctgtattttgcaattcagccaagtaaacaagagccggtgaaatggggaacgtatctttaccttgacgaataataaaaaatgttataatttaactataagagattacgttaggagattatatcgatgaaaactaagaatttatttacttcattagctgccgcagtgatgctttcagctggtttagctggtgcaggtgtgtctgctgcagaaccagttcatgcagcaactacacaaacttcaagcaaaaaaggtaccattagtattaagcgtagatcagtatcagctacagttaataatgctaatcctaagctttacgctgtaaaccaagatggtaaaatcgtaaagtcaatggattcaaattatactaaaggtcaaaccatccagctttacttttctaacgaggctaagaacgatcaaggttctgttactttctattatgttgacagtcaaactgtagatggacaacaatgtgcaatttatgttgtttcgactgatgttaccccttcagcaacagttccaagtcaagcagactggtcaaagcaagcacaaagtgacaaaaaagccattcaagatgcttacaacaatagagcattaaagtacatcgttgtttcacctaagtcaaaaaagggtgcaaagatctactacgcatataagaagagtgctaaggctaaaaaggtttactttaaggcaaccaagaagaagatcaagtacggtaagaagtacaagtcatcgatgatcgttaaaaacggtaagagcagatatgcttatattggtaagaagagatacttaaagacctctactattaaagtagtaagtgttaagtacgcaccagttcaattatcagatgatttgaagaacttaattgttcaaaactagaaaaagttaataaaaattgtagcgtaaaggatgaattattgtcctttacgcttttttgatctaaaaattaataataataatattgataaaaaaactcactgacctacaatagactttgcgttatttttagggagttgtaaaaataagaatgaagagagtaaaagtctatttaggattagcttgtttgatgacgttattatgtttgaagccgcaaatggtttgggcgcgagaactaaatccatttcagactaagatgattaatccgcatacgtcttatagaatttatcaaaacttaactcgtaaaggtccgtcaagaagtctatgccttgctaatacgtttaaacatggcaatgttcaagccagtgcagttagaaaagttcgcggcaataagtattgctatgtttggttagacggacatagaggcggttgggtcaatcagcgagcttttttaagaagaaaaattgcagttgtacatcagattagtttagtgaagaattcgcattatagttttccaactagggatgcgattaattatgcaacagatgcagcaggaacgataattgagccaagtaaagttaaagtatctcgagcagaagtttcatcaagtaaaaaggaaagctatcgggtaagttattcttatggtaaagctcatgctcagacagttgttcaagtgagagctaatgctagagagggcattgttaaagcaaccaaaaaaccacaagctggagacagtgctcgtagctggttcaagcactataagacgtctggtaattggggcagaagttttgcgccggaaactaaatcgcatgttttaaaaagtgttcattttaaactgaaaacctatttctatcaacctgcgactttatgtcaaagtgattcggtaactgggacggtgggactagtaccagaaggattgaccgtgtcaaatggttcaatgtatgccacaatgtatcattcacctaatgatacgcgtgctcacattgtttcttacaaatttaatcaagtgcctaatcgctatactatgcaaaagttgccatggctaccttggtcacaatttctgcggcttgcatcccatgttaagataagcccatatattaaattgggacatggacaagcaatcggttcaactcgaaagtatatttatgtgattgctaataaccatttattgcgcaagagctctcaatcagaagaaattatgcagattagtaaaaacaatttgcaaattaaacagatttggacttttaaagtttggaatcattcagctagaacaggtcgttatttccataatgctacttttgtaaatgatcaccaatttattgccgtttaccatgatgccacagaccaccgttttgaatattgggaagttactcgtcagggtaatagttggtatcctaaagagattggcgctactagaggagattttatgcgcaatgattctcccgttcaaggaattacctatgacaagcataaaaaacagatttatttggcctttaatgattatttgtttaaattgaaacgctcaggtaaagtgctggctagaggtcactttcatacagggcgtgaatttgaggggattagcataaatggtcgtcatttatacgcagagctggcgcaaaggccagaattgttgaggcagaggataagataataggtgtaaaaatatgttatacccagataaattctatttaacacaagatttaaatagaagatttgccagaactaaccttgctcgactaatatttagtgatttgcattttgagaaaacaaatatttctttaattcaaacacaattagttgctgatgggttaaatatagagagggcttccgagaaagataaggaaagaattattcgattaaaacgagcatggcaatatattattaatgaaaataaggtgttatctttagatattgaactaaagatacatttattactgacaggctatggcttccgagataatctaaactacaaacaagaagaaaaatttttcgatgagttaatgaacaacgatacctcgactacagataaggcaatgacattgatgtatcataatatgcgtaatcaattattctggggcggaaataagcgtactgccacactagctgcaaataaattaatgattgaccatggagcaggtttaattaatgccccacttgataagtgggatagatggaacaagctgattagtcaatattatttaaccggcaaaatgaatatgttaaaagattggacctatgaaaatggcattcaaggagtagtgctgaataataattcagatttacctaaacctgatattaatccagaagattatgattaattacttaagcagaccgaataggcctgctttttttgtgtgcaaaagctctttttgaaaatatcatgataaaagttcataatagaaattgtttgtttatgttaaaggagttgttttattttttatgaagaataatgatcacgttaagataagtcctagtagtcttgtcttgatgattttttcttctatttttggatttagtaattcactgacagctttttatcaaatgggttattcaagtatcatttggtatattgtcacagctattttattcttcctgccatcagccttaattttcgctgaatatggtgcttcctttaaaggaattaaaggtggaatcttttcatggcttgaaggatctactaatgaaaaagtatcatttatcggaacttttatttggctggcagcttgggtaatttggttagtttcatcaacccaatttttcttagtttcagtttcaacggcaatttttggtcatgatactaccccaagctggcatttagggtcgctgacttcaactcagttattaggtgtgttggaagttattttcttagtaattgttacattttgtgccgcaaagggaattgataaaataaaggcgattaataatattggtgggatctttactttaggaattgccattggttttacagcagtttcactttttgtctttattttgaatcatgggcaattagctgaaccagtgaccgcacaaaatatggttcattcacctaatccagcatttcagtcaccgattgcggttatttcatttattgtctatgctttatttgcctatggtggtctggaaacaacctcaggagtaattgattcagttgataaaccggaaaagaattatcctaaggctctgattacggccatggtcttaatgacagcactttatgttgtaaacatctttatgtgtggggtggctgttaattggaacaaatcgttaggtggtaaaggtgttgacttagctaatgtcgaatatgttttgattaataatttaggtattgtcactggtcatagcctaggtctatcacattctacttcactggcaattggaactgtcttttctcgtttggccggaattgcggatgtgttatcaggaattgccgctgcctttttgatggtttattcaccgattaaatcatttattgaggggtgtgatccgcgactattgcctaagaaaatggttaagttaaataagcacaatatgcctgaattctcgatgtgggtacaagcaattgtggttagcgttattatcttatttatttcatttggtggtaatggagcacaacaattctatacaattttaatggatatgatgaatgtttcttcatcagcaccatatttatttttaattgctgcttacccattttttaaagctaaaaaagacttagatcggccatttgtttttattgaaggtaagaaaaaagtttgggcaacgacaattgttgtttggttagtggttgcggtcggaattatctttacttgtatagaaccactctttaccggagactggcaaacttcattctggacggctattggtccagtggcctttggtgttattgcttggatttattacgcatataatgaacgaaaagaaaaagcaatggcttaatacgcaaaataagacgaaggattttgtccttcgtcttatttcttttctctattttttactttaagccagctactctgacaacatcacgttcaatcattaattcctcattagttggaataaccataccaacaatagttgagtcgggcttggtaataatggtggcattttctttattagcggctgaatcaggcttaaggcctaaaagttcgagtgaatccatgacatgttcacggacaccaaagtcgtgttcaccgacaccagctgtaaaggcgataccatctaggccacgcatttcaagggtataagcaccaacatagcgaatgattcgattaatgaaaatgtttctagctaagtcagcacgcttcttcttttccccttcgagcttagtcatgtcaccacgtaaatcacgcatatctggtgaaatgcctgaaattcctaacaaaccagattcgttgtttagaaccttaagcatttgatcagcatcaagattttcctttttcatgacaaaagcaagtaaagaaggatcaacatcacctgaacgggaactcatcgtaatacccgccattggtgaaaagcccattgaagtatcgaatgatttaccatctttcacagcggtaactgaagcaccagatcctaagtgacaaacgattaatttcaagtcctttaagtcgcgtttcataatttcagcggctttttgactaacatatctaaccgaagtgccatgtgcgccatattttcttgcaccgtatttttcatagtatttatatggaagtgagtacaagtagtgcactggatccaaggtttggtggaatgaagtatcaaagacagcgacttcagggacgccaggcaatactttcatgaaggcattaatgacatcggcttcagcggtattatgaagcggcgcatattgtttcaaatcataaatcttttgtagtgacttttcatcaattaaggtggagtccttaaattcttcaccacccgcaacaattcgatgtccgattccgatgatttctttaggatcgtcaattaaatcatacttttttaaattttcaagcaagattgtaacggcagtttcggaatcaggaatgtcaactttttcttggtgtttttcacctttaaccttgattgtaaaggtggagccgttaagcccaactcgatcagccatcccttcgctgataactttttcatcaggaaaggtgaaaagcttaaatttaaaagaagagctacccgaattaatcgctaaaatttttttcataaattatgcctctttttcttaatttttgcagtgcaacctatccagtaagggcatgcaataaagaaaatgccactaatctgctttaagtaagttcttgcagtaatagtgtcaacgtctttattatacaacttttgctgtaagctcttacagatatgaaactgtcaaatcttttgtgtaaatagatctttctcgtaaattgattttttaattatttatttaatcaaagtaggattctaaggtgtcctgaacctgaccaaagcctttatgaattcgattgaaataacggtcattgtagctcattgcctgaatgccaataaaagcatcaagcgactgttcagttggaaactctgccttaggcttagctttgcgcttgatcacattgttaaatgattcaatcatgttagtcgaataaattgaagctctgatctgcttgggatagttataaaagaccagcagatctggttctatgtctttcaagcttctgataacatggctgtaaaccttgccccatttggtatagaagtcatgcaggacagctgtggcttcttctttgtttgtctgttgatgcacctgtttgaattcgttcatgatcttttcacgatcgtcgacgcgtactttagcgcagatattgcgcatgacatgaaccaaacagcgttgaaaatgagctttaggataagtcctggccaaggctgttttcatgccaacaacaccatcagaaagaaaaagctcaacttgctttaagcctcgggatttcatgttttgaagcatatctgtccagacttcaatgttctcgctaggcgcaatgcagtagtcaatgacctccttgtgcccattaggcttgatgccaatggcaatatagactgcttcacgctcaaatgtttctcggcgcaaaggaaggtatgtcgcatccaaatagacgcagaaaaacttgtcgcttagcttgcgtttgtggtaagcctcaacctttggaatcatctgcttggaaatatttgatacctgagctggactgtaatggctgccatacatcttttcaattagatcggctatttccctggtggtcacgcccttggagtaaagcttgataatcatgctttccaagatatccgagtgctgcttgtagccaggcagcgtgtgctgatgaaattgaccgttgcgatcccggggcacttgcacttcaattgggccaaattgcgtatcaactttgcggaaataagcaccatttctagagttgccagtattccagccatttctggcatagggatcatagcccagaaaggcagtcaattcagcttctaacaagttattaacagcctgttgtagctctttgcgcaataaatcatttattttgtctggattgaatagagcttgagcaaaatctttggtaaaatcattcatgaaggagttcttctttctgtatgtgtttttttgttcaaaccaatcatacgagaaaggaactcctttttctaatgtttaaagaaataaatttaaggaatcattcatccttacacaaactattttacagtctcacagatatttttttattactaaaatttatatataaatttgattgatcatatataaatttagaatatcaatttgcaacaaaaccgcttacaaactataatgaaattaacatacaatatatattgagaggagaaaaacgaatgacccactactacgaaggctttccacaaagtgaccgcgatgaaaaaatcaagatggtgaatgtggatgaacttgaagaacgtgttaagaaggtaatgccagaaggtgcatattattatattgcttcgggtgcagaaaatgaatggacctggcgtaacaatactgctgcttttaatcattttcaaattgtacctcgtgctttgactgagatggctgatccgcaaactgatactgattttatggggatgcacttaaagacgccaattatgatcgctccaattgcttgtcatggaattgcacataaagatgcggaagtcgcaacgcaaaagggtgctgctatggctggtgcgctctttagttctagtacttatgctaataagagtgtagaagaaattgcagctgcagctccagaagcaccaaggtttttccaactttatttgagtaaagactggaattttaatcagatggtttttgatgcaattaaaaaagctggttatcaaggcattttcttaaccgttgatgctttggtatcaggttatcgtgaagcaaacttgcggactaactttacttatcctgtaccattggacttctttaagcgttaccttggtgcaaaaggtaaaggtcaaagcgtagctcaaatgtacgcttcttctgcgcaaaagattggtcctgaagatgttaaaagaattaagaaagaatcaggtttgccagtctttgttaaaggtgttatgtgtgctgaagatgcctataaagcaattggagccggtgctgatggaatttacgtaactaatcatggtggtcgtgaagttgatggtgctcctgctaccattgatgttttgccagaaattgcgcaagcagtaaatcatcgggtgccaattatctttgattcaggtgtccgtcgtggctctcatatctttaaagctttggctttgggtgctgacattgttggaatcggttgcccatatctttatggtttagccttaggtggtgcgcatggagttgcttcagttattgaacaattaaatgatgaattaaagattgatatgcaattaacgggatgcaagacaattgatgatgttaagcatgctaaattgacgcacattgcttatactgctgataatttgccatctaatactgatccaagcagacgcaaggaatatccggtaactgacgaaaatcaagttaagcaaactgatgcggtatctggtgcttctaagttagaaggaaagccagctccggaaccagagactgataccacaactggtgcttcagtaagataaagcaaaaatataattaatattttcaatatgattgtcattgaataaatgatagtcatatttttttactatcaagaactcagcggctacaatcaaggtgaaagcgattcgatttttggagaggaaaattaaattattgaagagaataatgttttgactgatactgaagagcttaaaatcttgagtgatcttgttgcaataaaatccgttaatgataatgaaattttagtagcaaaatatttacaaaaactattaggagaacatggaattagttcacgtttgttggaatattccacaactcgcgcagatttatttgctgaaatcggaacaggccatcccattttagcaatttgtggtcacatggatgttgtttcaccaggtgaattagatcaatggcatactgatccctttaaattaaccaataaggatggtaaattgtacggccgcggagcgactgatatgaagtctggtttagctgccttggttattgccatgattaatattcatgaacaccatttaattaagcatggtagtatcaggctgctagctacttttggttggtgaaccttctggctacagtattgccattgctcataagggttcgatggatactaagttaacttcccaaggcaaggaagctcatagctcaatgcctgaaaagggttataatgcgatcgatccattaatggatttattagttaaggccaacaaggcttttagagaaacagataaaaacaatccagacttaggtaagttgacgttcaatactactgtttttactggcggggaacaggtcaacatgattcccggagaggctaccgcgcaaattaatgtgcggactattcctgagttcaataatagtttggttgaaaagaaattaactgaattagttaaggcagaaaatgcgcaaggagctaaaatcaaaatgtacatctatatgtcggaaccttcaattaaaactgacggtaagtctgaatttgtaaaattagcccaaaaaattggagcaaaatatgcggaaaagccgattccaacagttgctattaaaccagtaactgatgcttcgaatttgattgccgacaaaggacctagctatccgtttgccatgtttggtcccggtaatgacacgccgcaccaagttaacgaatatgttgatgaaaagatgtatttgaactttgtgaagatctatactgaattgtttgtggcctatttgaataaataatttggaaagtaataaagagcctaggcaaaattttagcctagacttttttattgtattttgaagtattctttagccgcatcactcatccgttcaggggtccaaacaggataccagacaaattctacatcaacatttttaacttcagggacttttttaacggctgttgtaatctgcttgatcaaataatcagtcaaaggacaggcaggtgtagttaatgtcatattgatgagacagatcccatcttgatcgaggtcaatttcataaatcagccccaagttgaccacatcgacgtttaattctgggtcaataacttgagctaaatgttcaataatatcgtttttaattgttttgctatcacgcattgtgttacctacgcatctttaccaaaaatttttgctttaattgcttgacctgttggtgtaccagctaaaccgccgattccagtttcacgcagagatgccggcatttgatgaccaactttcttcattgcttcaatacattcatcagctgggattacacttgtacatcccgctagcgccatatcagctgcgataagtgcattaccagcgccaataccatttcttttgacgcagggaacttcaaccaaaccggcaatcggatcacagactaacccaagcaagttagacatcgcaatcgataaagcttgggcactttgttcagcactgccaccagctacttcaactgccgcggcagcacccatggctgaggcactaccgacttctgcttgacagccgccagttgcccccgcaatttcggcattattggcaatcaccatgccaaaaccgccagcagtaaaaagaaagcgaatcatttgctcttcgctgagctgtaatcttttttctaataaaaatagaacgccaggtaaagtgccggaagaaccagccgtcggggtagcgcagacaacgcccatcgctgcattgacttcgttagtggctatggcattttcaactgctgccatcattgtatcgcctgaaagtgtgtgtcctttctcgcgatattttttcagcttaattgcttcgccaccagttaagccagtttttgaaaagacaccgtttccagattcacctcttttaacggcagctcgcatagtttgcaagttatatttcatgcgctgccagactttttctcgtggcaagcctgatagttgacattcttgttcaataattaattcagaaataggtttgtgcgttttttctgctgcagcaacaatttccttaatatggttatacataatattgccctatgttataaacaaataatattctcaaattttttatttagttcttgcaataaatcaggatgaagataattttctacatcatattcataaatattatagtttttagtatgaaaaattcgtttgcgactaaagggtgctttttcgtgtaagagcgcggtaagctcttgttcaatgcgaatatttttgtgtggatcaactaaaataataataggtaatgcaccagcaggttgaatctcggtattatgtaagacaattttgcgaatttcaattgcaccaccaccgatagagcatccagccaattccactttctttttatcattagacatatttaaaatagcagtattagggtgaccaattgggctaggaccatcttcttcaacaaaacgtaaatctacgccgcgctggcgtgcaatctcaggtgcctttggtacgcgtagatcgtctgagtcaaagcctaaaatacctgccgcaatagcatagtctgttccatgaccacggtgagtttgggcgaaagagtcgtaataatgaacggtaactttactcggggtaccgccaaaaagtttgtaaccagcgcgtccaatagcgacggctccggccgtatgtgaacttgatggtcccaccattacggggccaataatgtcaaaaacacttttataccgattagtcattttaatccctgctttgtaagttattctgtttttaattataacgaataataaagaagattaagaaagttttttggagactgtaaaatagtttgtgtaaggatgaatgattccttaaatttatttctttaaacattagaaaaaggagttcctttctcgtatgattggtttgaacaaaaaaacacatacagaaagaagaactccttcatgaatgattttaccaaagattttgctcaagctctattcaatccagacaaaataaatgatttattgcgcaaagagctacaacaggctgttaataacttgttagaagctgaattgactgcctttctgggctatgatccctatgccagaaatggctggaatactggcaactctagaaatggtgcttatttccgcaaagttgatacgcaatttggcccaattgaagtgcaagtgcctcgggatcgcaacggtcaatttcatcagcacacgctgcctgactacaagcagcactcggatatcttggaaagcatgattatcaagctttactccaagggcgtgaccaccagggaaatagccgatctaattgaaaagatgtatggcagccattacagtccagctcaggtatcaaatatttccaagcagatgattccaaaggttgaggcttaccacaaacgcaagctaagcgacaagtttttctgcgtctatttggatgcgacataccttcctttgcgccgagaaacatttgagcgtgaagcagtctatattgccattggcatcaagcctaatgggcacaaggaggtcattgactactgcattgcgcctagcgagaacattgaagtctggacagatatgcttcaaaacatgaaatcccgaggcttaaagcaagttgagctttttctttctgatggtgttgttggcatgaaaacagccttggccaggacttatcctaaagctcattttcaacgctgtttggttcatgtcatgcgcaatatctgcgctaaagtacgcgtcgacgatcgtgaaaagatcatgaacgaattcaaacaggtgcatcaacagacaaacaaagaagaagccacagctgtcctgcatgacttctataccaaatggggcaaggtttacagccatgttatcagaagcttgaaagacatagaaccagatctgctggtcttttataactatcccaagcagatcagagcttcaatttattcgactaacatgattgaatcatttaacaatgtgatcaagcgcaaagctaagcctaaggcagagtttccaactgaacagtcgcttgatgcttttattggtattcaggcaatgagctacaatgaccgttatttcaatcgaattcataaaggctttggtcaggttcaggacaccttagaatcctactttgattaaataaataattaaaaaatcaatctacgagaaaaatctatttacacaaaaaatttgacagtttcagattaaatttcttcactactcaattcaaacatattaataattgatttaaacatagataaaagttgtttaactattaaaaatgaattttgtgaatataatgttatcgataacagaaatcatttttatattgcaaatgaaagcgcatacgtttattgttgaatttgaaaaaacatgattttgtggaggaatttatttatgaataaaaagagtggtcataatatcaaatttaaatcaatttttgtatgtacttcagctattatgagtctttggttaggggcaaacttaactacgactcaagttcatgctgcagaagacaatgcagctcctaaaagttcagaagttgtaggccaaacgaattctagcaaagataatgcagctactgctactgtacaaaatcaaagtaacgcaaaagcaaagcagcgtcaacaaggtgtagctcctcaaaacgttcctacagttttggcagccaaaactaaagatgagggaacaaataactctccagcacgtgaggaagttaaagatcagactaaagtagttattcactacaatggtgatggtgaaaaatgggttccttatatttggggtaagaaacctaatggtaacggcaatgaatacaaatgggccggcaaagatgataatgggtattactcggttattgatttagataaaaactatgaccaagtaggagttttaattaaaaccaaaggcagttgggctggtaaagacggtacaggtgctgatcgtagcttaaatgttagcgataatggcaaagcggaagtcttctataaagcaggtagtgatgatgcccaaaaggtaacaccagagtaccattccgcaaatataaatttgcattattacggtgatgaccaagttaataaggttaatgtttggacagataaggatcaagataataaacaacttattagcttaaccaaacaaggcaatagtcaagatggctcaatcaaattagacaatactgattttagtaaactttttgttgcgccagttggttctgatgaaataacaagagaattcactccgttaccgggtaataaggcgacagatatttatttagttaaaaatgatacagaagcttattatagcaagagttttgccttagctgatcaaagtctatcttctgcatatatgacttcaccagatagtttgactgttgaagcaggtaaggctactactgtcgataaaattaaaggaaaacttagtctgcgaaataatagtattgatcatattgaagcagtcgatgctaatgctgatggtaaagcaaagaaatttattattcataccaaaacagatattgatattttaaaggataaccaagttggactagggatgaactttaaaaatgttgatatcggtccttatgttcgttccaaagcttttgacgataaatatgcctatgatggtgacgatctaggctgcacctatgatagtaaaaagacgcaaattaaactctgggctccaactgctaaagatgttgaattgaatttatatgatagtgttgataatagtgccaagcctacgaatgttattgctttgacaagaggcgatagaggtgtttggactggtattattaagggcgataaaaaaggctgggcttatgattttaagttaacttttggtaatggcaaaataacacagactgatgatccatattctaaagccgttactgtcaatggcgttagaagtgtaattgaagactacaataatatcaaaccgacagattttaaccgaatgccttcattctctaagccaactgatgcaatcgtttatgaaatttcaattcgtgactttagtagtgatcctaactcaggaattaaagataaaggtaagttcttagggatgattgaatcaggtaagacaccaactggacaagttactggtttagactatctcaaggcattaggcatcactcatgttcaaattatgccttcatatgatttcgctagcattgatgaaactaagagtttaaagaatcaatacaactggggttacgatccaaagaattatgatgtgcctgaaggatcatattcttctgatccaactaatccaactgctagaattatcgaaatgaaagaaatgattaatggcctgcataaagctggtattagggtcattatggacgtggtatacaaccatgtttataatcctcaagagcaagcttttgaattaacagtgccaggatattatttccgttacgatgctgataataataccacaagtgatagtggctgcggtaatgacattggtagtcaacgtaaaatggttcgcaagtacattgttgactcagtagtttactgggctaagaactacaatctagatggcttccgttttgatatcatgtccttactagatcgagagactatgaatgatgttagagctgctctagataagattgatcctggtattattacttatggtgaaggctgggaagttggtaaccagaaatatactagagaagaaggaacgacccaatacactgcggataaagttcctaatgttggtttctttagtgatgatatgagaaactcggttaaaggtaataatgatggctccgaaccaggattagtaattggtaacggtaatgaaaaaaactttgataagcatgctgtcttgtttaccgatagttttttaagaggtaaatggttacataatgattcttgggagccacataactatgcaactccaagccaaatggttaattatgccgcttgtcatgatggtaagacgttgtatgattacatcaaggctgcaatgccaaatgaatcagatgagaatattgccaggagagtaagattggctaactcaatgatcatgctttcacagggtatttctttcttccactcaggtcaagaagcattaagaactaaaggtggcaattcaaattcatataattcaccagtaaatattaatgaaattaattgggaaagagttggtgctaataaagcatcagtccaatatttccaaaaattggctaaattacgtaaacagctgccaattttgcatttgaatgatttcaataagatttatgacgagaatgttactaaaattattagttatggtagagaaaccaaagataaaaacatcaagggtgtatttgagtacgaatataatgttaatggcaagaagttattaattgtctttaatgtcaacaatgataaagttgctctaaataatgttgatttatcacatggtaagaaattgttagatagtgatggcaatgtgaaattaagtgataaaactatgctggcaccattaagtacacttgtagttgatgaagatggaacaatggttttaccagacgtgccaaaaccagatcagcctgtaagtccaaccactccaggtgataagccaggtaaaccaactacaccagaaaatccaaggattccggatcaaaagccagccaatccaattgttccgcaagaaacaattattacacctgaagctccaagtgaaaatagtattatagacaatactaaaaatataattaatggatcagaagagactactacagtttctactcaggataatacaaccactgaaatattattgacccataatgcttatgtgtatgacagtgaagcaaatcctatttatcaaaatgataacaagcttgtcttgaaagctggagatacaattaagcctttggataatggtaaaaagtatagtattaaaggtaagttgttctataaagtagctaaaaatcaatttgtcaaagttgctaatactgttagttactataagttagctcataactcattcgtttataataagcatggtaaagcagttaagaagaatggaaagcgcattttacttaagaagaataagcatatttcacttcattctgataaggtcgttaagattaaagggaagaaattctatcaattaaaagatggtagctttattaaggctagaaatgttaaaagaattggttagatttagatagttaattaaaaatattaaaaaacaagattgtttccaaaatgggcaatcctgtttttttaatcctgattaatcaagctaacgggcaaagtataaaaactctccaatgataccgctggatcattaatttcgcaatctctttagtccgttgccgcgcactaattaaatgtgggaataggttctgaatcaattgtgtgccgtcaaatcctgtaattaacgattttttatttaaataatcgttgcattctttagccaataaagccgtaatgtcatccgtacaacaaatcgcatcgtaatcgttatctttcaaaaattgaaggatagcgattacgatgcgataattgattcacgggcgctaattgagcgtaaatcaaatttaacgtcaaaggtattaaacacacacatcatccctttgatacgatcactgattggataatagtcttctttggaaccagcaataatgattactttcttctttttttgctttaaaaccgactttgcaatttgcatctccgcatcatagttattcgactgcacagtagggatctgcggactaattacccggtcaaaactaaccaccggtagattaagcttgccactcttctttgaaatctgaattggcgagctggtaagtaagcctacgatctttttttgcttatatttatccaaataatactgcatatcttgctcttgataatgatctaaatgcaaaatgcaatcataacctttatcctgcaaaatagtagccaagtattcatacagttctgaatagaaaggattattgatttgcgaaaaattgatttcaattaagtttaattctgttttagcggaaattgcattcttgggtttataacccagttttttgatagcttcctttatttttaaagccgaatcaatgccaacgtaaccattctgattaagatatcgcgaaacggtggcaatagaaacgccggcttttttagctatttctttaatagttactgccatgttttacacctttatatgtaaatcctacacactttctatcagtaagtatagcatattctaaaacctgaattgtcaaattaagtgcaacagttaggctatgaggaaatatattgcttgaagagttcttctgctgtgtgatattgaaggattcgacgatgtttgcggttaatggcatcagttgcctgttgaacataagcagctgacttatctttcatgcttttgcctttagggaagaattgacgcagaagtccattgcagttctcattggtgcctctttcccatggagaatatgggtgggcgaagtagatctggcagcctttgatcttggtcatatccgcaaactcagagccattgtcaaacgtgatcgatttaaaccaggcaggatgtctgtcaatctcattttgaagcagccttgggcatgtgcttgcccgatagtcaggaatcttgataactacttcaaagcgtgtggttctttcggtcaaagtcattaaagcaggctgattcttgcgtctgacgcctttaaccagatctccttcccagtgcagcggcgtttttctgtcttcaatctctttaggacgctgttcaatggaattgccaagatgcttcttgtgcaaagcatgaccgctatggccgtgatgacgcttgttcctgcgtcttttgagcttcataggcagatcaatattgcttatgtccagcaagccctgatcaatatagcgatagacggttggtgtgctgggacaagggtagcctggcatttgaattcaccaacgaattcatcgatgctggtggcatcaaatttagctttaaagcgtctggagagcattctcaaaaagacagcataatgcttcaatggattgcgctgatagcagtttttgcgacgcttctcataatgaagctgtgcagtatcagcgtaatagtgctcatacaataaatagctgctgtctctttgcaggacgcttccgcgtttgatttcgcgactgattgtcgacttatggcagccgacttcttgagcgataacagtacgggaagttatgccggaatccagcattgcttgaatttgtccacgttgtacgctggttaattgatgatagtgcttagaaatgctagaatttgaattggtcatgaagatcttcctttcttgatttttcgtcacttcaagtttaggtcttcatggcctttttgtttaacacttggtgttgcacttcaattttaaatccgggtccattattaattcctttcatagaaaactaaattccttttctaaaggggtcaagagctattatatacagttttctcagcagttacattcgcaaaaaagaaaaatgctaaatttatttaaaatatttagattttttatgcaataaggacaaatagctaggagaaagaacaaagaatatctccccatctattgatgtaacgctaaaacataatttactttctttgtaattttgtgtatactaaatatacacaaaaaagaaagaggcgtacaactatgactgtaaaattaagaaaagttggaaattcaaaaactttaacagttcctaaagatataataattactagtaaagagtatactgtgaaaaatgaggggatgaatatagtttttacacccgtcgtgaagaaaaagaaaaatatttttgcaaccaaagaatggcaaaattatgattatcaaaaagacatagaaaatgacgtggaactacaatcagtaaaaccagtgggacgtgaggtagttgattaatgatttatccgaaaaagggagatattgttaaagcagatgcagaacctcattccggacatgaaatgggtggccataatccgcataaaggtaatattagaagacattatgtggtaatgagtaccagtgcctataataaatcaacacatatgtttatagggatgccgattactacttcagataaatatcaaggcaacccacattacgagccaatattaattccaggcagtaatggcactggagtaaaaggttatgttgttttatggcaacttcagaattttgactttgaatctagaaatggagaaattgttaatcacgtaaatattcagctattagacaaacttcaaggtttcgtgaatgatatggtgggactagaataggtaaaacaattatgccaattttaaggctagttcgattatgctgagaggacgattctgaggtcaagttcgactgcagaggttaaaattaatcatttaatgcaatagaatgctaattcttatttttatgggaaattagcattcttttttgtactttctaactatgtagaataatgagattttattctacatagtacatctaatcatgcattattctgctatgccaattttggggtgtgttgattatgtagtataattagctatagactaattattcaacatagagtgacgaaatacttgtatatcaaggactaatataaaaattgacagaaggagacgtaaattgaagcataaagatactcgtccaattactgatccaataattttaaagaagtttttgaaacatttacgtgaagatactagtatgggagaaagaaactatgctatatttcaaaccggtaaagcaaccttactacgggtaagtgatgttctagctttgaaaaagaatgatgtctttcaagccaatggcagagttaagaaaaatgcttatatcgttgacaaaaagacaaaaaagcctaaccgattatatttaactccagttagggatgttttagaggattactatgattggctgcaagaatatgaaaagaagcatccctacacgaagctgttttcttctgaatggctatttccaagttctaggagattaggtgaggatgttccaataagagaaaatagtttttatagaatttgtcatcagaccgagcttaaaattggggttaattggattggctcacactcaatgagaaaaacaggagcttttatggtttatcagcagactaatcataatactgctttagttatgaaaatgctaaatcactccagtgaagcaatgactttaagatagagaccgtaaaatattttgtgtaaggatgaatatttccttaattttattttcctgaatattagaaaaaggaatccttttcccgtatgattgatttgaacgaaaaacatactagaaaagagattccttcatgaatgattttaccaaagatatggctaatgctctattcaatcaggataaaattaatgatttatttagacaaaagctccaacaggctgtcaatgacctgcttgaatccgaattgactgcctttttaggctacaatccttatgagcgcgatggctggaataccggaaattctagaaatggtgcttattaccgcaaggttgatacgcaattcggacaaatagaaatcaaagttcctagagacagaaacggtgagtttcatcaacacactatgccagattataaaaggcatactgatgttttagagcaaactgttatcaagctctattccaagggcgtcacaacccgagaaatcgctgatttgattgagaaaatgtatggcggctattattctccagctatggtttccaatatttctaaagaaatgattcccaaagttgaggcatatcatcagcgacatctgtcagataagttcttctgcgtttatctcgatgccacctatattcctcttaagcgggtcacttatgagcgcgaagcagtttatatcgccatcggtatcaaacctaatggtcataaagaagtgattgactactgtattgcgcctactgaaaatattgagatttggagcgaaatgctcaaaggcttcaagagtcgcggccttgaacaggtagagctcttcttgtctgacggagtagttggcatgaaagaggctatctgccagtcctatcctaaagcgcattttcaacgctgcttggtacacgtcatgcgtaatatcagtgccaaaatgcgggttgacgatcgaaaaaagcactggatgaattcaagcagattcatactcagtcaaacaaagaaatggctgtacaggtgctgcatgaattctatcaaaactgggaaaaagcctacaaaaacgtagttagagatcttagacaggttgagcctgatctgttaaccttttacaactatccgccagctattagagcttcaatttactcaactaacatgattgaatcctttaacaacaggcttaagcggaaaaccaagcctaaaacagaatttccaactgagcagtcgcttgacacctttattggagttcaggcaatggattacaatgaccgttactttaacaggattcataaaggatttgggcaagttcgagacaccctagaatcctattttgattaaaagataaataaaaaagtcaatcaacgagagagattatttacacaaacttcttgacagtctctaatgtcttaactgttaacttaggaaaatgtcctaattgtagtaagtatgacataatttcctttattggaggttatagttagagtgaataggattgatttaactatgaaatatgatgaacagtacaaagtcattaaggatcttgtagatcacaacggcaataagaaaagagcagccttgaagctaggaatatccgttagacaaataaacaggagaatcaagcagtatcaagctaaaggaaaagcggccttcgttcatgggaacaaagaccgcaaacctgttaattgtctcaccacagaaattaacaatcaaattgtaaccttataccgtactaaatatcaagactgcaatataaaacattttgtacagctgttagatcgctttgaggacattcatgtctcttataccaaagcttacagcctgctcaagcagcaggatattctttcccctaagccttggagaaagactaagcgtgccttagccaaaaagaaatggcataagcagcaccctaagcaaagcaaacaagaagtcagcgctgcagttgatcatcaactagctttggcagatgctcatcctcgccatgaaagatgcaagtacttcggcgaagaaattcagatggatgcttctgtcttagtctggtttggtaagcgtaaggcttacctgcaccttgcaatcgacaacgctactggcattattgttggggcttattttgactgggaagagactttgaatggctactatcacgtctttgagcaaattcttaaggaatatggcattcccctttgctttaagactgataatcggactgtattcaattatgagactgctcaaaccaaagctgcccataaagatgtgctgacacaatttggctatgcctgcaaaactcttggcgtagatctaaaaactactagtgtttctcaagccaaaggcatggttgaaagagctaaccaaaccgtccaaggtcgccttaagccagaactaagattggctggaatcatgacaatcaacgaggcaaataaatacctgcatgatgtgtttgttcctgactttaaccaaaacttcagtcagactagtcgtaaagcctggtatgtttttgaaaaggctcctgatgactgcaaaatcaattataccttggccgttctcactggcagagtgtttgatagcggctcagctatttctttcaaaaacaagctttatcaagcaacagatgaatatggcaaattagtctgcttcatgaaaggaactaaatgtctggtaattgaagccctagatggacaactgctaacgacagtagatgagcatgtatatctgcttaaagaaattcctaagaatgccaaaatatcgccagaagtagaccaagagcctaaaaagaaaaggaccaagaaaaagtggattccaccaatgtcacatccatggaagcgagaatcattcataaagcaacaaaagagagctcataaataccatcaatacgtataaaaatagcggagagcaaattctccgctaataattaaataattttgggacattttcctaaattattgacatatttttatgataattcatttgcaagcgtaagtcctcgtaaattggttttccacctaaaatgtccagaatgtagtaagcaacgaaagtaacaataatcattggcaatacttgctggacagtcccaatcatttcagtcagtagcataattgctgtgaatggtgctttttctattgcaccaaaatatgcggccatggaaatcactaggatatgagggaagtacattggcaaaataatctgcaattttatcataatattggcgcaaattattcccaataatgccccaagaactaggataggcatgaaaataccaccaggtacggaagaatcatatgaaagcattgaaaagacaaaccgaattatcaagaataagatcggtagtaaaaaaagtcccatgatccaaaggctttgacattccaattcaaattgaataaattatcaattaacacatgtgaaccaccgagtaagtgggcattaaatagaccaactggaataattaaaattaaagcctgaattgtcaaattaagtgcaacagttaggctatgaggaaatatattgcttgaagagttcttctgctgtgtgatattggaggattcggcgatatttgtggttaatggcatcagttgcctgttgaacataagcttttgacttgtctttcatgctcttgcccttagggaagaattgacgcaaaagaccattgcagttttcattggtgcccctttcccatggagaatatgggtgagcaaagtaaatctggcagcccttgatcttggtcatatccgcaaactcagagccattgtcaaacgtgattgatttaaaccaggcaggatgtctgtcaatctccttttgaagcagcctttggcatgtgcttgcccgatagtcaggaatcttgataactacttcaaagcgtgtggttctttcagtcaaagtcattaaagcaggctgattcttgcgtctgacgcctttaaccagatctccttcccagtgcagcggagcttttctgtcttcaatctctttaggacgctgttcaatggaattgccaagatgcttcttgtgcaaagcgtgaccgccatggctgtgatgacgcttgttcctgcgtcttttgagcttcataggcagatcaatattgcttatgtccagcaagccctgatcaatatagcgatagacagttggtgtgctgggacaagggtagcctggcatttgaattcaccaacgaattcatcgatgctggtggcatcaaatttagctttaaagcgtctggagagcattctcaaaaagacagcataatgcttcaatggattgcgctgatagcagtttttgcgacgcttctcataataaatctgtgcagtatcagcgtaatagtgctcatacaataaatagctgctgtctctttgcaggacacttccgcgtttgatttcgcgactgattgtcgacttatggcagccgacttcttgagcgataacagtacgggaagttatgccggaatccagcattgcttgaatttgtccacgttgtacgctggttaattgatgatagtgcttagaaatgctagaatttgaattggtcatgaagatcttcctttcttgatttttcgtcacttcaagtttaggtcttcatggcctttttgtttaacacttagtgttgcacttcaattttaaatccgggattaaaattaaaggaatgatactgtgataggctgcagggatttttttaattttactgaaccatggctttagcgaaagtagtacatattgataaatgtatgccattattcccaaaaagataccaattaaaggtaaataatcgttaacgggtaaataaaggaatggtttgtttccaaaggctagaatagtaacgaagtcagctgaaaaagtggcggccaagacggctactactttttgaggtttaaaatcaaaagtaatttcttcgaccaagaaaagtgcaccagctattggcgcgctaaaggcggcagccaatcctgcagccacaccgcattattgtagcgttctcaaattttccttgttagatttaaatactttttctgctaatccttgaccaaccattgcgcccatttcaatacaaggaccttcacgacctagcattaatccaggacagatagctaataagcctccaataaatttccgccaaagaatggaccaccatggcatcttattttcatttaaaagaacagcctcgatttgtggtacccctgagccaattacttgttcaaggtaaggcgcagttattttacctaatgttattgcaataatgaacatcaataagatgtagggtacgatcagtactcgctgggctgccatttgcggataaatttgataaagcaacttcatagtttgatcaataatccagcgaaatgcgctaactataactccagtagttagcccaactgaaattgcttgaaccaaagttttagtcatgttggttgaaaaaaggttttgctaaaatctgttttgcatttttaatcattacatttccccatattacagacgatacatcctttttatcctaacaaaatatagcaaaaaaggcatttatgtttttgatgaatgatcttatttttgtaaaaattgttgttcccaatcatagacattttttatatgcttctttaaagcgttagaggctaacaaaatatcttttttctcaactgcagaaataatatccattatttcctgaaccgaggatttcatacaacgatcattgtctacgatggcataacgcatacgattggtttgagtacgtaaaagatcgatggttcgctgaagcgtgggatttccggtattttcagttaaaaatacatggaatagttcatcaagtttaagataagcttgccaatcatgttttgctaaaatttcttggaattttattccataatcattagccagttgtggatctaaattgggaaaatttttttccaaggcataactctctaatagagaacgtaaatcataattgtcttttaattcagctaatgtaatatggctaacgattttttttgtccttgacgaactagtaagccttcattttccaattgtttgattgcttctctaattggagtacgagacatgttaagtttaatacgcgtttgattttctgataaaagatgacctggcttaaaatgaccagtgtttatttggagactgtaaaatagtttgtgtaaggatgaatgattccttaaatttatttctttaaacattagaaaaaggagttcctttctcgtatgattggtttgaacaaaaaaacacatacagaaagaagaactccttcatgaatgattttaccaaagattttgctcaagctctattcaatccagacaaaataaatgatttattgcgcaaagagctacaacaggctgttaataacttgttagaagctgaattgactgcctttctgggctatgatccctatgccagaaatggctggaatactggcaactctagaaatggtgcttatttccgcaaagttgatacgcaatttggcccaattgaagtgcaagtgcctcgggatcgcaacggtcaatttcatcagcacacgctgcctgactacaagcagcactctgatgttttggaaagcacgattatcaagctatactccaaaggcgtaactaccagagaaatcgctgacttgattgagaaaatgtatggcagtcattatagtccagctcaagtatcaaatatttccaagcagatgctccccaagattgaggcttatcacaagcgcaagctaagcgacaagtttttctgtgtctatttggatgcgacataccttcctttgcgccgagaaacgtttgagcgtgaagcagtatatattgccattggcattaaacctaatggacataaggaagtcattgactactgcattgctcctagtgagaacattgaagtttggacagagatgcttcaaaacatgaagtccagaggcttgaagcaagttgagctttttctttctgatggtgttgttggcatgaaaacagccttggccaggacttatcctaaagctcattttcaacgctgcctggttcatgtcatgcgcaatatctgcgctaaagtacgcgtcgacgatcgtgaaaagatcatgaacgaattcaagcagatacatcaacagacaagcaaaaaagaagctgcagctgtcttgcacaaattctatgccaaatggaataaagcttatagccatgtcatcaaaggtttgaaggaaattgagcccgatctgctagtcttctacaattatcccaaacaaatcagagcttcaatttattcaaccaatatgattgaatcctttaacaacgtcatcaagcgtaaagctaagcctaaggcagaatttccaactgaacagtcgcttgatgcatttattggcatccaggcaatgagctacaatgaccgttatttcaatcgaattcataaaggctttggtcaggttcaggacaccttagaatcctactttgattaaataaataattaaaaaatcaatttacgagaaagaactatttacacaaaagatttgacagtttctattcatttggttctcctaactaagataattttacaacttttttattttttatattatttgcaactaataaaactaaaaacttgtatacaggttatctgtggtaaatcgttgacttacaaaatataagttttactatgtaattgtaagttaaattttgatagaaatgaggaaagaaaaatgactaaaattgcagtacttggtgcaagtggacaaattgctaaattagcagaaaatttatttttggaagataaaaataatgaattaattttatttttacgccatcctaataaattggataaaaaagatatcgatgatcaacgtgaaaggattgtcgtaggggatgcaagtaaattggatgaacttgctccggctattaaaggtgcagatatcgtttatgctaatttagctggttcaaatattgaagatcaagctaagacagttgttaaagctatggatgaagatggtattaagcgtttgatttggatttcctcgttaggagtctatgatgaggtaccaggcaaatttggtgaatggaacaagaatattttaggttcatatttgaccacttatcgtgcagctgctgatcaaattactgctagcgatttggattacacgattattcgtccagcttggttgaccaataaagatgaagttgactatgaaataactgaaggcgcaactaccccatttaaaggaactgaggtctctcgtctaagtgtggctagttatgtaaatgaaatagttaaagaccaaagtaaagacagtcgtggtaatgttggtttaaataaaccaaataccgacggtgataagccagcttggtattaaaacaaaaaaataaagaccagcttcaaactgcaatgtcattaagttaagacattgacaaattatcgacttggacttttaagatcattcatttgcgatttatcgcatttgaatgctcttttttcatgccaaataaacccaaatcttgtttagaaattaggctacacgatataaataatatacagctgatttgggtttgagatttcttttgtcttttcgtcctggtctgatcggaattgtgtaatgactaatttgaataagaatctttttaaagatttcagttgaagaagaaattatatacatagcctggatgacaaaacatgactgtttgaaattgatcgcatattgatacttgcattttttttgtggtacatatgcttgagcatcaatttgactgactgcgttaaacataatcatgtgggcatagatctccatttcaataaatctatcctgcttggaatgaaactgtacgctacctaaagcatatttcaactttttgaatgaagtttcaatgccccagcgcaaatggtagatttctttgatcctttttaagggataatcggctctatttagattagttagaacaacttcccattcttctttgcctgatttaggatcattaattctaaatttacaggcacgaaattttattgtacataactctccaaagtcccagctgccatctttggtatttttagaccgatattttatatattgacggtaatgatggttaaccaaatgaacgttttctgtagccttatgggtttcataataataattagaggtagtcacccagcaagctatatccttatcacactcttgattaggcaactcagctacttccttaaatgcgccatatcccgttttagtacgtatgacataataacagttaggcaggcgattacaattttcaatcatgttaaagccggtataacctcgatccatagtaactatatatggtccgcaatttagctttttaagcatttgaacggcggctttacgttcatccatctttgacttaggctgaaagatgcagtcttgataagtattatttaacaggtcatagagtgcattaacatgaatttggcaatatggctttcctttatgattgagatttccaacgatattctctgatttaggattccagatttgattaaaatcagacccatcaatggcaaatatacgatatttatgatcaaataactggatattaaataaattctgattaaatacagttagaatatgcttaaaacatgcgggtgaaagctgacctttgcgttggacataagcggaagtactgactactttatcgttatttttaatagctttttggccaaaagctctaaacaactcactggtcaaatcttttccttgcatattaatagtagttttaatgactgtagctgcatctaaaaaccgcttcctagtgaaggcatgaggatcatcgataaaatcatgaatatgctttccagtatcattgataatttgatcaagacgatctaaaatatttctgtgaagggctttcataattaacaccagctttctggcaataattttgaaggtttaataatttaatcagagggcgaaaaggtaggttcttttcgcctttattttatgcaaaaaaagaaccaaatcataatgattcggttctacagagattagattcaatttgtcaatgtcttaacttaatgacattgcttcaaactgaaactggtctttattttggcttaattatttttcgaattgtttgccccaagcccatggatcttcgtgccaggtctttaagacatcatattgcgtgctagaaatatgacctgactcattttcctttttgagtaattcagggtaggaaagaagcggagcatatttaacattagctttagcaaagttttcttttgcatccggtaggtagtaggtgaaaattgaagaaacgccaatgacgttgccgccatctttttcagttgctttaactgcatttaaaacggaaccaccagtggtgattaaatcatcgattaaaacgatcttatcatctttactgaagcggccttcaatttggcggcctttgccatggtcctttggcttaggacgaacatagatcattggtaagtgtagtttatctgcaacccatgcagcatggggaataccggcggtagcgacgccaccaataatagtagcctcagggaattctttggcgattaaattagctaaatcaccagcaatcatatcgcgtaattctggatatgaaaccgttaacctaaggtcggtgtaaattggagaaagcatcccacttgcgtaagtgaatggtttgtcaggtgagatagtgataattttttcttgaataagttgactgataatttgatccttatgcattttagttaaactcctttttaattgcttcatatgcagcttctgggtcactggctaaagtaattggccgtccaacaacaatagcgcttgagccccattctttggcttgcgctggtgtggccacgcgagattgatcgtctttagcattgccagcaggccgaattcccggtgtgacatataaaaagtcatcgccaactttttcgtgtaattcttttacttcaagtggtgaacaaataaccccatctgctccagagtgcttagccatttttgctagcgaaagaacttgctctttcattgacagtgcgcaattttgttcatgtgccaatacttcatcagaaatcgaagttaattcggttactgctagtaacttaggcacgcttttgccagcaggtgtacccgcgattaaaccgtctttagctgatttgatcatttgactgccgcctaaagcatgaacggtagtaaaagtaattcctaacttagctaattgtttagccccgttataaacggtattagggatatcatgcaattttagatccaagaaaatcttataaccttgctcagctaagtctttaaccacttggttgccagcgtgatagaataattccataccgactttgataaagacgttttctggtttgcctaatttagacaaaatcttatgcagttgctcttcattgtcaatatctaatgcaacaattacaggtttcatttttcctccacaaaaaaagtctatcttagcgcagagagacaccaaggatagacttttcctagataatttaagtcaatattttgaacttgcggtctctctgtaccgtttaaagtttgatcaaggtgaagtttaacacctcaaaagtaaaaatacaaataaaatttttgcttggaaaaaattataatcacgtgtagaatcatttcttgaaaaaataaagagtgtccgtgagcattcattttggaggaaaattatggttaatacacatgtaaaattaccaggtttagatttgaaaaatccagttatgccagcaagtggaacttttggcttcggcgatgtgcctgcagctaagaagtttgacttaaatgatcttggagcaatggttattaagacaactacgccacatgcaaccacaggtaatccgcaaccacagattgacgttttagatgatggggttttgaattcggttggtcttactaatcctggtgtggaaaaggtgattagtgaaaagttagaaccattgagaaagcaatatccagaattaccgatcgtggctagcgttggcggtgatagtgaagcagattatgttgaagtagcacaaaagctgtcaaattctggcttggttaatgctttagaaattaatgtttcttgtcctaatgtggctcaaggtggaatgagctttggcgtgcatgccgatgtggttgaagaattgactagaaaaattaaagcagttgtcaatattccaatttatgtgaagttaacaccaaatgtgactgatatcactgtaattgctaaagctgccgaaaagggtggtgccgatggcttatcgatgatcaatacattgctagggatgcgaattgacgtgaaaaaacgcagaccactgttaggccataatatgggcggtttatcaggtgaggctgttaagccaatagctattagaatgattagtcaagtgcgtcaaattacttctttgccaattattggcatgggtggcattgcttcggccgaagatgtggtggaatttatgttagcaggtgctaatgccgtagcggttggtactgctcattttaaagatagtattgcttctaagcatattgcagatgccttgccgcaagaacttgaaaaattaggcattgaagatatcaatgaattagttggtcaagtaaaatttaattagagcttgacaaacgtttctaattacagtaactttaaagcaatgaatgtcctttaaaattagtcccgtgaggctagcaaggcaggcttaacttaagtttcgactttactaaagctcctagtctcagttgagattgggagcttttttcatgggcagaattaggaggctataatggcaaaagaaatctgggatgcactagcaatgaagcgtgctttaacccgtattacttacgagatcattgaacaaaataaaggaaccgatgatttggttttggtagggattaaaacgcgaggcgtttacttggctaaacgaattcatgaccgtattcagaaattggaaggcgttgatgtaccagttggtgaattggacattaccttatatcgggatgatcgtcatgatgctagtttaaagcaagatccagttgtcaattctgatcaagttggtgttaatattgatgacaagcatgttgttttgattgatgatgttatctatactggacgaacaatcagagcggcgatggatgctttgatgcacgttggtcgcccaagttcaatcagagtcgcagtgctagttgatcgtggtcaccgtgaattgccaattcgtgctgattttgttggtaaaaatattccaacttctgccgatgaacaggttgctgttaatgtaattgataaggacggcaaagattcagttgaactgaaggctttaccaaaataaaaagaagatagttaaatatccaaccatttaattgactccagagagggccagaagggttgatttcttttcgtgtacacgggaagactctaggcctggagcaattaaatgcttcaggcttttttgtatagaaagaatagaaaatggaaaatttaaatcttgttaatttaccacattttgtgagtgttgaaaatttggatagtaatgaagtagaagccttaatcaggagagctgagtacttcaaaaaaggcggtgcaacaccacgtttaactaagccagtttatgtaactaatatgttttttgaagattcatctagaacacatacgagctttgaaatagctgaaagaaaactaggtttgacagttattccttttgatccggctcattcgtctgttaataagggtgaaaccttatatgacacttcattaattatgaacgccttaggtgtcaacttagaagtgattcgtcactcacagaatgagtattacaatgatttgattaacttaaaagaacatcaacatttaaatattggtgtgattaacgctggagatggtagcggtcaacatcctagccaatgtatgctcgatatgatgactattcatgaacattttggccactttaaaggcttaaaggttgcaattgttggtgatattactaattctagggttgcaaaaagtgacatggaacttttgactaggttgggcgctgaagtttacttctcaggtccaagttactggtatgataaagaattcgatcaatatggtaagtatgaagaaattgatcaattagtttcaaatatggacgtgatgatactcttacgggttcaacatgaacgtcatgcaggcgatcctaatgaaaagacttttaatgctaaagcatatcacgaaaaatatggtattaatcatcaacgctatagtgcattgaagcccgacaccatcatcatgcatccgggtccaattaaccatgatgttgaacttagcggtgatttagttgaaagcgataagtgcatgtttgtcagacaaatgcaaaatggtgtgttcatgcgtatggcaatgatcgaggcagtattgcgcggtagacgacttggaggattagaataatggcaacagtaattaagaatggcacagtttatcaaaatggtcgtctaattaaagcagatgttttaattgaagatcaaaagattaaagcaatagggactaacttaacggcagataaagagattgatgcaagtggcaagctagttagtcctggactggttgatgtccacgttcattatcgtgatcccggacaaacttacaaggaagatattaaaaccggtagtgaagccgctgctcatggtggttttactatggtaggggcaatgcctaatgtaacgcctgtacctaatacgcctgagctaatgcaaaaaatggtacaagaaaacaatgaaaaaggtgtggttcatatttttcaatatggaccaatcactaatgatgaaactactgatgtcattcctgattatgcagcattgaaaaaggtaggtgcttttgccttaagtaatgatggtcatggagtccaaactgctcaaacgatgtatttggcaatgcaaaaagccaaggaaaataatttgatcattgctactcatgcacaagacgattcgctttttaataaagggatcgtgaatgaaggacctaaagccaaggaattaaacttgccgccagtaactgaattagcagaaacaacgcaaattgctagagacttgcttttagcacaaaaaacgggcgtccattatcatatttgccatgtatcaactaaaactagtgtggaactggttcgaatggctaaggcgcgtggaatcaatgttacctgtgaagtagcgccacaccatattttattaacagatgacgatattcctaaggacaacggttattataagatgaatccgccattgagaaataaggaagatcaagcggcgttactagtgggactactagacggtacaatcgatttaattgcgactgaccatgctcctcatgctcgcaatgaaaaagaaggtggcatgaagggcgcagcctttggtattactggtagtgaaacagcattttctactttatatactaaatttgtcaaagaagaaaaagtcttcaccttggagcagcttttatcatggctctccgataaaccagctaaaacgtttggcttaaaaaatgccggggtacttgaaccaggtaagccagctgatattgcgatttttgacttagaccatgaaactgaattaaaagaagaagactataagtcaaaaggcgttaatacaccatttacgggcgacaaggtgtatggtgaaactgtaatgaccatggttgatggtcaggttgtatacagaagggatgaacaataatgcggtatttaatcctagaagatggtagcatctatgctggcgagggttttggcgctgattgcgaaacagttggtgaagttgtatttacaacagggatgactggttatcaagaagcaattaccgaccaatcttatgccgatcagattttggttttcactaatcctttaattggaaactatggtattaccttggcagattatgagtcacttgagccaaggatcaaaggcgtaatttgtcaccaggttgcccgtcatcctgataattggcgaatgcagacaaccttaccaaagtttttggagcatttgaacattccaggtattcagggaattgacacgcgtgaattagttaaaaaattgagagttcacggtacattacgtggtaagattgcagattcaaaagaaaatgcagaaaaaattgcggcagaattaaagactaagaatgtaactcaaggtgtaattagccgagtatcaaccaagtcaccatatccagttcctggttcgaaacgcaatattgtggttatcgactttggaattaaacacagtattttgcgtgaactagcagaacgtgattgtaattgtattgttttaccatatacagctactgcccaagaagtattaaaccttcatccagatggtgttcttttgagtaacggccctggtgatccagaagaaatggtagaggcaactaaaatggtgcgtgaagtagaaaagcatgttcctttgatgggaatttgtatgggacaccaagtctttgctttagctaatggggctaaaacttacaagatgaaatttgggcaccgcggttttaatcaccctgtacgagagattgcaactggtaatattggttttacttcacaaaaccatggttatgctgtgtctgcagattcaattgacaaggataacttaatgattacccacgttgaagtcaatgatgggacggttgaaggattacgtcataagaaatatcctgcattttcagtgcaatttcaccctgatgcaacaccgggtcctcatgatgaggtttcattattcgacgactttatgtcaatgattgatcagagaaaggaagaagagcgtcatgcctaaaagaacagatattcataagattatggtgattggctcaggtccaattattattggtcaagctgcagaatttgattattctggtacacaggcatgcttggctctgcgcgaagaaggctatgaagtagttttagttaattccaacccagctacgatcatgactgatacaacaattgcagataaggtgtacattgaacctctgacagttgaatcgatttcacgaattattcgtcaagaatatcctgatgctattttgccaacacttggcggtcaagtgggcttaaacatggctatggaacttgccaaaacaggaattttggatgaattacacatcgagcttctaggtactaagctgcaatctattgaacaagccgaagaccgtgaaaaatttaaggaattatgtaagtcattaggtgaaccagttccaccttctaagacagttaatacagtcgaagatgccttagcttttggagatgagattggctatccgatcattgttcgtcctgcctttacaatgggtggtaccggtggtggtatctgtaataatcatgaagaattagcagagattgccaaaaatggattggaactttcccctgtaactgaatgtttgattgaaaaatcaattgcgggctataaagaagtagaatttgaagtaatgcgcgaccatgatgacaatgcaatgattgtctgctgcatggaaaactttgatccggtagggattcacactggtgattcaattgtcttttcaccaagtcaaactttatctgataaggaatatcagatgcttcgtgattgttcactgcgtttgattagggctttgaaaattgaagggggatgcaacgttcaacttgctcttgacccaaatagctttaattatgatgtaattgaagtaaatccgcgtgtttcaagatcatctgctttagcttctaaggcaactggttatccaattgctaagatggctgctaaaattgcagtaggaatgactttggatgaaattaagaacccagtaacgggaacaacctatgcagaatttgaacctgcattagactatgtagtctgcaagataccacgctggccatttgataagttccctaaggctgatcgcgttttgggcacccaaatgaaagcaaccggtgaagttatggcaattggccgtactgcagaagaagctatgcaaaaagcggtaagatcactagaaattgatgaaaaagatctttactcaccagaagcacacgtagctagtgatgaccaattagagcaaaaattagtcaaagctcaagatgatcgtctcttctatttagctgaggcatttagacgtggttattcagctgaagatgttcatgaattaacgaagattaatttctactttttagatatcgtgcaacatatggttgaattggaaaagacacttgaggaaaataaagatgatgttgatgtattgcgcttagctaagaaatatggctttagtgatccaacgattgcctctttgtggaatgaaactgcagatgaggtaagagcatttcggaaaaagcatggcatcatcccagtctacaagatggttgatacatgtgctgctgagtttgaatcaaagacaccatacttttattcaacttatgatgctgaaaatgaatcacataagactggtaagaagtcggtgatcgttattggctcaggtccaatcagaatcggtcaaggtgttgaattcgattatgcgactgttcactgtgtcaaggccttgcaaaagatgggctacgaagcaattgttatcaattctaatcctgaaactgtttcaactgacttctctatctcagataaattatactttgaaccattaactttggaagatgtcttgaatgtctgcgacttggaaaagccagaaggcgtgattgttcaatttggtggtcaaacctcaatcaatttggctcatggcttagaagaacatggcgtcaagattttaggcactaaagtagctgatgttaaccgtgcagaagaccgtgaactgtttgatcaaatcattaagcaacttcatttgaatcagcctcaaggtttaactgcaactactcatgaaggcgtacttgaagctgctgataagctaggctatccagttttagtccgtccaagttatgttttgggtggtaaggcgatggaaattgtctacaccaagggagagttagaagaatacttgcaagaccacgttgatattgcagcagaccacccaatcttggttgatgattatcttgatggtcgtgaatgtgatgttgatgcaattagtgatggtaaggaagttcttttgccaggaatcatggaacatattgagcatgccggtgtccactctggtgactcaatggctgtttatccaccacaaaccttctctgatgaagttaaagaaaagattactgatgtcactagaaagcttgctttgactttgaactgtgtcggcattatgaacattcaattcattgtcagagatggtgaagtttacgtaattgaagttaaccctcgggcaagtagaacagtgccatttttaagcaagatcacgggtattgaaatggctcaggtcgctacccgagtaattatgggcgaaagtttggctgaacagggctacggtgatggtcttgccccagagccagacatgatctctgttaaagcaccagtcttctccttcagcaaattatcggacgttgatgcatatctcgggccagaaatgaaatcgacaggtgaagtaatggggagtgatcacacttttgccaaagctctctacaaagcttttgcaggtgctaagatgcaattgcctgaaaatggtaatgtattacttaccatcgaagatcgagacaaagaaaagattttaccaattgccaagagatttgcgcggattggctacagaatctttgctactaagggtacagctgatttcttgcgcagtcataatttgcatgttgatccagtaactaaagtgcatgaagatgaagacgccaaggataatatcttgaatgaattaagaaatggcaagattgacttggttatcaatacgatgggtcacgatattgaaaagaattctgatggcttcatcattagacaggttgccattggtcaaaatgtaccattaattacagcacttgatactgcagatgctttgcttactagcttggagaatagatcatttgctactgatgctttgaagtaggatagttgaatagataaaaataatgcatttctctattgaagtaggagaatgcattattttttatgcaaaaaattattttcacaagtgagctaataattctgagataaataaacgatagatagcattcaatcaagatattgtgaaaaaaatatgtatcacaaactttattatagagccatgagtaagagtatttcactatctttcgtaagcgaatacatttataatctgagataaggaagtgaagtgtttaggggggaataaaaatgtggatttcgtttttattggctttaattccaattatttggcttatttactctttggcaattcgaaaaacgcctgctattaaagcatgcagcattggactattaattactatcgtattggctatactgggatttaacctctctatagttgacactttgacgggtgctttagagggcattctgatggggctatggccaattgtttatgtaatcgtggctgcactgtttacttataatgtaagcaattattcaggtggaattaaaattattcaagatactttgtcgtcaatcactactgatcagcgtattttagttttgattatcgcatggggatttggcggattcttagaagcaattgcaggttttgggacagcagttgcaattcccgctgggatattaattggatttggtcttaatccgattaatgccgccgtaatttgtttaattgctaatactacaccaactgcctttggtgcaattggattaccagtgattacactgagtgacgtaactaatttgcccgttactccattatcatttgttattactttacaacttgcattattaattattataattccgtttttattggtgattctaacaggtggcggagttaaagctatcaaaggagtgggattaattaccctgatgtctggtttgtcattttcaattccgcaaattttggtagcaaaatttgttggtccagagttaccagcaattgttggttcaatttgttgtattttgactacagttctgatggcaaaattatatcatcatcaagataatgacataaaagagaatattgagaagcacagcgctatcgaaattttgcgtgcaagttcaccatttattttagtgttcgtatttgtggttcttgcttcatcactgtttccagatattcagcatctattgggaaaagtgacttcttatattaaggtatatactgggaaagatacagaactgtttaagattaattggctttcttcaccaggaacattaattttgctagctacttttattggtggattaattcaaaaagttagtttcaagaaattaggacaaatcttaaaatcaacaatttttggattgtggaaaacattaattacaatttgttctattgtggctttagccaaggtaatgggctacgcaggaatgacttcagcaattgcggcagcattagtagttctaatgggaccaatatatccattagttgcaccgttaattggtgcttggggtacgtttattacaggatctgatacctcagctaatgttctttttggtaacctgcaattgtcttcagctaaggctttaggcgtaaatagtaattgggtagttggttcaaatatggtgggagcaactgctggaaagatgatctcacctcagagtatagctgttgcttcagctgcaattggacaagatggatctgaatcaataattttgaagcaagtggctaaatggtgcttattgtatttgggaataatttgtatattcctatatggaataggctttgccgtaggatttttataaaaataatttaaataactcttggtgttctgatatatattgatttgcacttgtcatccattaatagtaaatcgcttgcattaaaagcgctttcgttgatagaatgctttttgtaacttttttacattaataagggagacaaaacgaatgagttatttatttctgtttattccggcaataggatggggtcttatgcccatgtttgttgctggtgtcaagaagagtaacatttaccaccaaattttaggtaccgttattggtgcatttatctttggtgctgcagttactctcattaagcgtccatcttttaatgcgactacttttattttagcaatgttagctggtgctgcttgggttattggtcaagttggtcagtattacagttattccaaggttggggtttctgaaactatgccaatttcaactggtttgcagttgatcggagtgccacttgtaggtgtgttgatctttggtgaatgggcaagcactcaagctaaattgtttggatttttagggatcttagctttaattattggtgtagcatttacatcattgactgacaaaggtacatctgagggtggaaaaaagaatcagaccactacaatgattgtgctggtattgactacacttggttacattacttcaagttccattccaaaggccttgaagggtgacagcgtaatgattttctttgctgaaaccattggaatgttggttgcagcaattgtttatttaattgcaactaagcaaacacaagtctttaaggaaaaagaaagttatcaagtaattcctgccggtgtgatttacgcaattgctgctcttgcatacattgtttcagttaagatgaacggtgtaaacctagcctttgttatgtcacaactttgtgttgttatttctactcttggtggtatccttttcttacacgaaaagaagacacaaaaaggtcttatttatactgtgatcggtttaatattaattgttgccggtgcagttttgacctcagtattttaatgaattttaaataaatattgaatgaactccaacatgataattgttggagtttttgagtaaaaaagtcatgaataaatataaaatgaattaaaatataagtagaagccaaagagaggatgatttctatgagtgataatacagtatacgtgatcgacggtcgtcggtatgcacgtaatggagaaattgtcgaacataatgtgcatgtttatagttcttatcaaaatctgattgctgcatttaagccatttttggaagtttcaaataaagaagtgcatatgaatggcaaaaatgagatgcttcaggttagaatatatgatccatcaaatcaatttttgacaaaatataaatttgatatttatgaaaagaaaatagataatttctttccaagtactactgaacatatttagcaaaggaatgatccgatgacttttaacaaagaagaaaaagagcaagctttaaagcggctaactgatgaggaatataacgtaactcaaaaggctgctacagaatatccttttaccggaaaatatgatgatttttatgaaaaggggatttacgttgatgtagtgtcaggtgagccacttttttcaagcttagataagtataatgcaggctgtggttggcctagttttactaagccaattaagaaattaacttaccaccgcgatcaatcgcacggaatggagagaacagaagttaaaagtcccgaagctgattctcacttaggtcatgtttttactgacggcccagtggatcaaggtggtttacgttactgcattaattccgcagcattgagatttattccatatgatcagttggaacaggctggctatggtgaatataagaaaatatttgaataaaaaattatttctcatagaacttaatttcagtattggccaaatcaactgtataagtttcttcttcaagtggtcgtttagtcattccttcatcagttgagtagatgatcaaggccaacttactaccagatggaagagtgtagtaggtaggttgaagcaagaagtctaaatcgtagaacttgtcagcatcaatcttctcaggtcttttcatgtccttatagttttgtaagttcatgtgacccttagtgatcaacttagccttagtcttcttgtccggcacaaattcttgcaaagtatcagtgccaaatctatagccaagttcttgaccgccgcgcattaagaacttaggtgtagcggttaagcgtcttctttctcccaattcaactaaagcaacagaaatttgtcccttaggtaagctgcctttaactctaacttttacttcaggacgaccgacaatcgtagttgggtgaataaattcgtctgtttcaaaacgcaaacttggtttagcccatttttcatcaccacagatgaacttgtatagccagtcgctttctgagatgtcagccttcttaaattcaatgccaccttcatcgacaaatgattgttgtgcattgccattgccatcttggaaaagctcgccgtcatcagttgggtagtaggtcttcttttgacctaattcatttgaccaatccttttcttcgtgccacttgtcagcttgcaagttgtcctggatcatgacggttggccattgcttgtaagcattgttttcaatccctagtaattcatgtacaaaccaaaggttcattaagtcagtaaaatcaatagaaacaaagttgttcatattgtagtgaggaccttggtgtaggaaaagatgatgcttcattggcatttttttgactagttgccaaattttataaacattctttggcttaacgttccagtcatttaaaccgtgaacagaaatccaagaacatttgatgccgtcagcgtgatggcggtagtttcttgcttcccaaaagttggaatattgaccggtttcacggtcttcttttgttaaaagctctttttgcatcttgtcgtattccggtttgatcttcaagtaagaacctgcatcccacaagtttgattgacaagtttcagccagtaaatcaaggtcttcaccttggcaggcttcgggtgcgattaccaaaccgtgttcacggtaatagtcataccaagaagaaatagcagcttcagaaaccacagttttcaaacctttaaccccagtagtggcaatagcaatttgcaaagtgcctaaatatgaacgaccagtcatcccgatattgccattgcaccagtcagctttggtttgaacagatctagtacggtcagtgtaagcaatacgatcgccgtggagccattcgataactgcagcagctgattcagtttcttcaggtgcaccagtaatacgaaccccatcactaccacgggtaccgattgctccagcaaaaacactggcaaaaccacgagcaagcatatactcatttaatggataagaagatttatgtactgcttcttcggtagctgggtggttagagtcgtctggctgctttgctttaactattggtgcatgaacatattgtggatcattccaatcggcggcatcagataaattttcatcaacattatggttacgcttttcattagcgataattccgccgaaatatggtgaagcagtataaagggcaggcacttttaagcctttgttagtttcagctggtcggaaaacagtaacttgaatcaagtcactcttaccatcatgatcagtatcaagatcagtttcaacgtaaacaacttcacgaattactttgttggtatcgaagacaggaatagctttgccattgaaaaatttaaacttattttgtccccagaattgagtaaagtaccccttaccagccattacatcgagcaaaatttgaccgtttttggcgcgagtattgagcaaacgataaaaagcagagattaactttttgacatcagaaatgtcttggacaaaaggtaaagcattcttttgcataaagccagttggatcgactaattcgtagtcataatgaacatgatagccaagtaattgtaaggctacattatagaattgagcagtaccaattgattcaggctttccttttaaaaagtcagctaaagtttgctcatttgaaacagcaaattcagataattttgttgtcttagcagcgtcagtttttgcttcagcaattgtcattttaacgagcttgcccagcaaatcgttaaaattccagtctgcataatttttaggtaagaaattgatgtcgattaattcttttacttgttgatcgaagtcagtttcgacataagcgtattggttatatttcatatttttctcctttgcagtttaattactttctattttacttttaattgtggctataaccaatagatatggaagttaataagcgaaaaatatttttattttggtattcttttctttaaaatgaacttaaacaaatgggggatgctaaatgagaaaaaagttttcacttgtcttgctacttacaacgatatttacaatttcgctgacagcttgtactaatcagaataaggttgatcatactaaaagtcagactaaaatcacctcaacaccgacattatttttccacggtgtggttcgtcatatcatactgaagaacacatggtggcagcagctgagaaagctggagtcacgaactcagtgattagagctgaggtggcgcctaacggtaaggtttctttgagtggaagttggaaaaaaggtgccaaaaatccaattgcagaagtcaattatgaaaataaccgtgagttgaacttttctcgacatggtgtttacgccactaatgtagtgaaggctctgcaaaagcgttatggtattaaaaaatgaaccattctttaggaaatatttcgatcatttattatatgctgcaaaatggacgtaaccggaagatgccacaattagtcaagcaagtcggcatggcaggacattttgctggtttgaactttagccgtgttcccgcctcaattcgtcaacctaaaggtttaaaattgaattctgccggaaaaccgaacaaaatgaattctagctattggcaaatgacgggtgtaagagaaacatatccgaaaaataaagttcgtgttttaaacatcattggtgatattggtggtcaaaccgatggaacagtacccaatgtatcatctttgtcattaaagtatttagtggcagatcgtgctaaaagctatcaggtagtgaagtttactggaaaaaatgcacgtcactccaagttgcatgagaatccaaaagtagataaagtattaatcaaattcctgtggaataaataaagttagtaataggcatgcgaacgtatgtctattttttgtgccttttcttaatccaattacttgaattataaaataatgcgtgtataatattcatctaattaataaagaaagggcatggttttatgaagctattaaagactaaaatcttaacaattctgtgtggcttgctaacattgaacggcttagccatgttgttttcaggattgattatccaaatggacgaagttgctgattttgattcagcccaaagtttagcagttgctaattcgactaatgccattattttggcaggaattattatgattttgctttttggggcattgtttttcgatggttgggctaagctcaagaacaggcatgctaagcacgttaagttagtttaatagaatagatgtgtctgggaaaaaactaagtctcagatcatgaaaaaagaacgttgaatttttgtttcaacgctctttttgtatacttttagctccagccttgatattattaaatcatcacaaaataaaaacaaaaaggtggaaactaacatgtacaaaaattatatcacaggtcaaactgctttaacacttaatctagattttgccattccggccaatcatttggctaatgtcatcagctggtttgtagattcaattccagaagatgttttagtaggcaagactgctaaaacgggccgcccagcctatcatccagccatgatgctcaaaatactgctttttgcttactccagaagagttttttctggcagaaagattgagttgatgctggaagaaaatctgccaatgatgatcttggctgaccagcaaaagatttcatatcatactatcaataattttagatcaagcagccatgccaatgaactgattaaaaagagctttatctacttcactaacctgttagaagatgaaggcttaatcaatgaaggtgctgcttttatcgatggtactaagattgaagctgatgctaaccgctatacatttgtctggcgcaaagcggttgaaaagtatcatgaaaagctgaaaggccaggcagttgaactttatgatgaattgattactaaagaagtagtcaaagaaatggaaaaagaaaaagttcaaactagtcaggggctaaaggaattagctcaagaaactgaagcagaaattaacaagctgactaaagagattgagcaggaaaacaaagccattcctggcggttcacctcgaaaagccaagcgacgtggactaaaaaagattctgcaccggctaagaaaagattatgtgccaagaatgcaaaaatatgaagaagccgaagagatctttgccggacgcaacagttattccaaaacagatcatgacgccacctttatgcatatgaaggaagaccacatgaaaaatggtcaattaaagcctggctacaatattcaagcagtcacgaccgatcaatatgtagttgattatgccatctttcctaatccgacagatttcaaaactttggagccggttttggatcaaatgaccgtgttggacaagtttgacaaaatcgtcgccgatgctggctatggcagtgaatacaattattcgatgctggaggaaaaatatccagacaagaagtactttattccctacactatgtatgaaaaagaacagaccagaaagtataagaatgatccaactaagctaatcaactggtactacaatgaaaaagatgattattacattgatcatcatggcgtcagattcaatttcaaatattacagccagcgtaaggatcgttctactggtcaggtccgtgattttaaggtttatgaggcagacgagttccagctaacgccagaattggaacaattggctaaaacagctagcggccgccagcgccaagttcgctataatcctaactggcaatatttaaaagaaaaagcaaaagaagttctccaaagcgaagaaggcagacacatctatggcatgagaaaatatgatgtagagccagttttcggacatttgaagaacgtatttggcatgcgcagaacgcacctgcgaggtaaagagaaggtcgaaaccgatatcggaattgcctttatgatgatgaatttgaacaaatattgtcaaagaaggtggctgaagggccgatttttattgttaaaaattttaaagagaacaaaaaaacgatcaagattcttaaaaaaggaaatcttgatcgtttttattcatctggaagctagttttttcccagacactttttgcccaaaattaaagtcttctttaccgtttttttacttttgcatgtgataatgagccaaaattaatcagggggatagttatgggattctggtattattatgttttgccattagtgacggctattttattcgtttggctaggaaaccgagttatggtgactaaaaaatggattagcataattttttactcattagctggagtaggctatttaattgcatcggtttttgctgttttttatatctatgcaacagtagaagaaattttaacgccagatattttaacaaaaataggttggcattatttttggagtgataattttatttttcttcttaccagcactgttctattaacaattagctattttgtactaaaacgtggtagattacggatgaaataggatgctcaaaaatgataagattatttttggaaaaaatagaataatgatggggtgaaaaaatgactttaccatttaaggcagttgctgtagatatggacggcacgtttttagatgatcgtaagcagtttaatcacaaggaatttgatcaaattttgactgaatttgaacaacgaggagtacattttatcgtggcttcagggcgtccttatgttagattgaagcaggactttggcaagtttgccagcagaatggatttcgtaactttgaatggctcgagattaatcatcaagggtcaagaagctggcagttatttgcttaatcgcgatgacgttttaaagctaattcatgatgtacatgtgaaatatggtgaaatggctacgatggtttttggccgagatattgcatatttgcatagcaatgttgaaaaagatgaacgcgactttttggcttactttgctggtaatagcactgtaattaatgactggaatgacttaccagataagatttatcagatcacatttggaatggacagttctaaggctgcagaaattgaacgagattttaattctaagcacgataaccagatttctgcttttgcttccgctacttttgccattgatgttaacacacaaggtgttaataaaggcgccggattaaagcatctcctagaaaagatggggatgacaggggatgacctgattgcctttggcgatgggggtaatgacatcgatatgttgaaatttgccaaatattcttatgcaatggcaaacggtatggacaaggtaaaaaagcaggcgaaatatattgcaccggccaatacggagaacggtgttttcaaagttttgcaaaaatatttagctgaagataaaaaatagcttgtaaaattaaattaatatgatatagttttaattaacttatagaaatagaggaaattgccatatgattcgtttactgaatctctaatatttgatttgttgtttagcaaaatactgtctttgcaccttgtttagtgcacccattttttgcttgcataccaagtattagcagtagatgaattgagggtggttttctttatcgaaatcaacctttatttgttgcactgttaataggatgtgagcatccagaacagtgctttttctttgcgacaaatcatgttagagatttttttgctgattatacgtttttgtcaaaaaagaatgaagaaaataatgggtttaagagattatattaaagctaaccgtcagcgggcaatgttagttctgtttttgattacgctaacgcaactgacaactacaatgtacacctacttaactagtccgcagttaaatgcaattgcaagtggtaaattcgaactgtttttggaattaatctttgtacaatttttaattggacaggtctgcaatgtcagttttaattggggaagtttacaaaataccaaacaaacacagacactttttcatcaggtaagacagcgaattatacgacattattatcagcagcctgaagacaaagtctcagagatggaaaatcatttgggaaatgacttgcagttagtgcaagagagttactataatgtttacttctattttgtttgtgacttaatttatattattttacgcgtggtgctagttaaatcgttctagacaataagccaaattataagctaaaattgcaatttccaaccggctttgaaagcctatcagactacgtgctcgattgttctcggcattgtaataggtcagaagcgaaaagtcgctttcaattgttctgcgaatagccatcaattgatgatcattgtgctttttagctcctgtcatatttttacgatatggtgtccaaagttcataacccatttgttttagctgttgatgcagttctttgcctaaatagccttcgtcgccaagaagatagtaattagatggatgggtattttccagcagttcaactgtctccctggcatcatgaactgatgcttttgttacgacataatcaagaatgtaaccgtcatcgctaacaatgacatgaactttgaaaccatagaagtaaattttcttggtggccttataaccaatgttggcataaccgcgaaaaattttagcacgatagttgcgaattggttggcaaacaggtaccggaaagctgtcaatgatcaagaactgtccattcaggtcaacctttttattcatttcttgccgtatctgataaatcaattgcaatagctgacgtgaacgtcgattaaaacgtgagtgtgataaacaattgaaacattcacagaatcttctttgtgattcaattcctgtcttagcttgccagataagtaaagccaaaatcagactgtccgtagttttaatttgatcaatatttcgccgatgagtaaactcagccggtgcatacaaacgataccagtgccgacaaattatcactaaatctttaaaactaacttgtaaatggtggctaaaacgcttaagcttaaggcagttcaatcagatcagactcttttctttttgatactacaacttgagtctagtccgattggacttttttattaactaaaacgatttaactagcaccacgcgtattattttaactattggtacgctgtttacctttcattggatattggttgtctatacattattagttactttgcttgcagtagtagtgccgaaattgactgaaaaatataccaatcgagcaactaaagctgtttctatccaaaataagcaatttttgcagttgttagaaaaatggttcaagggtttagatgagctgcgacgctaccagaataaagttgttttgaaaaaggtggtgggacaacagagtcagaaactagagcagagtgaatatcagcgagataaattgctacattatactagcttagtgtctgcgatatttaatatagctggtcgtgttggtgttccatttattgctggaattttgtttttcaatcatcaggtaaatttaggagcgattctgacagcgggatattttgccaatggaattttttatagtgtagatagttgcgtgaacagatatacgcaattaaaatcaacgaaaactttgcgggatgatctggctaaattgcaaaagtgtttaccagaaaaagggtatgattctttaaaacaaatcgctaccgttcaaataaaaagcttgtcagtacaatatccaaatggtgaaagaattacttatcctgactttgaactgaagaatggtgaaaaggttgtattgactggtgattcaggtacaggaaaatcaactttattaaaagttttgttagggcaaattaagccaagtacgggtgaagtaatctattgcgataaaacaggaaaaaagatcaaacctgatttacgtcaattaggttatttggcacaggacttattgatctttcctggcagtattcaagaaaatattactatgtttaagcctaagcttaataaaaaaactgtacaagtgattcataagacggtttttgatagtgatcaagcgcgtttgaaaaatgggatagagacacagcttgatccacaacaggaattgctgtctggtggacagaaacaaaaggtagttttaatgcgggcgttgttgcatgagaagccgattctgtacttagatgaagcaactagtgcaattgatcaacaagcaacgacaaaaatcttccaaaacttaatgcaaagtagagcaacaattttggccgttgcacacaatttaaccgtagaacaacgagcattgtttgatcgtgaagttcacttggagggaaaataatgagtagcaaagaattatttaaacttaatccaattaaattctgtctggctatgggactacagattattgcagcagttggcgaagtagttgtagattatgtgttaactttgcaatttgatgctgccaaaaatagaaacttgagtttatttttaacttggacattaatccagctgtctagctatgtcatggtattcttattctataatttggcgggaatcatttggcaaaagttgattcaaaattacctgcatttaattcggcaagaactaacagatcattattttgccgatagtcaaaagcatgcggttagtgcagtgcaaaatcggatgactaatgatttgaaactgttacataatgactatttagattcgttccgctatgtagtagggatgctagccggtattgtcggtgtagcctttagcttggtgacttttcagtggagtttgttagttgcttgtttaatttttgccgcaattcagatttatttacctaaattactggataagccattacaaaaagctactgaaaaggtatcagtagctaatcgaaagtatttgaagactttaggtgattggttaattggcttatcagaagttcgtcgctatttggctagcgataagctttttaagactattgctgaaaattcaggacgcttggaagcagcaaatattgagaaggaaaaagtagatcaggaattagattatctgaatcaattggcttattcattaggagatgtgctaatctttcttttaactggatttttggtagtaaataattgggctgcttttggtttgattgccagcattggcaacttcaatggagcactatttggttctttgcaaggagttgctaattatggtggaagaatgcgagcaacaaagaaattgcgagaagagatttttgtagctaaaaagaaaattcagtctgaacagaaaagtaatttagaacaagcggttagtttttcaatccataatttagctatcgattttagaaacggtgaggccgtgactttcccagatttccaagttaaagctggagagaaaattttactaacaggtgattcaggtacaggaaaatcaactttactcaaattgattttaggtgaattgcaagccagtcgcggcaagattcaatactttaatcaaaagggtgaaaagattcaacctgatttagctgaaattggctatttgccgcaagatccagtgttattcccagtaacgattgttgaaaatattacgatgttcaattcaaaattgctaagtcgagttaaatcagccattgaaaaagttcaatttgcaggagatattgctaagttttcggccggcattgagactaagattggccttgatcaattgaatgtttctggtggtcagaggcagaaaattgttttagctagaagcatggtacaccagagtaagttgattttgattgatgaggcaacaagtgcaattgatcaggcggctacgatgaaaattttgcgtcagttgactaagacggatgcaacgattgtattcattgctcacaactttaatcaagaaatgcatcaattgtttgatcgtgaaattcatttaaagaaataaaaacaagctcataaccacaaagttacaggttatgggcttgttttattatagccaaatttgttcgaaaatatcttctttaaaaccgcaagttaaattactgtcatcaacgactaatggccgcttgattaacttaccattttttgacatcatatctgcagcttcttcaatcgtcattgttggcactttttctttcaaattttctctgcggtaatcttgaccgtgtgtattgaagaaatattttagaccacgatcttgatatttggtcatccattttaccaagtcttctttttttggtggctgttcaactaaatcttgaaattcgtagttgacctgatggtcatccatccacttgcgtgctttacgtgaggtagagcaacgtttataaccataaaatttaatcattattttccgtccttatttttgtaaaaattttctaaaaaattcaatttcttcatcatttgcgatgtcagctaattcatctttttgatcaacaaagaaaacatgaccacgtggattttcctcatcgccataagatttgcaaatagcatgaacgccgcggccgagtaagaagccaaacagggtaaattgcatgtcatgtaagaaatctttgttggcagtaatcaaaaaagttggtaggaaattatgattgatatatttttcaacatcgagttgttcatgatacttgttaactgcatttttagtgaagtaggcgctagccatgccatctaaattgcttggggttaacatgaaggaagcagcacaattcaagccgacagccctaaattttaagttcaatggtttgtaagaaaataacttggcataatctggattagtcaaaatagtgacatactgctcagccatttgaccaccggcgctgtcgccaacgataaaaacgttgttgcgatctagacgatattcttcagcgtgctcatcaacccaatgcatgtagcgatcaacatcgtctaattcatcagggaattccgcgttttctggtgcaagacgatagttgggattgatgaaagcaaaaccgcgcttagctaaacccattccataatattggtagatttctttagtaccataaacccaaccaccgccgtgaatattgatgatgacagggaagggagcttcgtgctttttgggtaaataaacatctaaagtatgccacttttcatctggaccataaggcagattatcaagacgttcaacttcagggatgtcgtgaggcaagccactgtcacgtttggtgtcatgctgatatgcaccatctctaaagtcagtaacaaactttttgattttatctttaagttccataattgttctcttttctaataattatctatgttaactcaattatactttaattgaatttgaaaaaataaaaacttttttgaaaaatcctcttgcattttaattaacgtttccctataatagtctatgttctgttgaggacgtacaaacatacaagatggtctggtagctcagctggatagagcaacagtcttctaaactgtgggtcgtgggttcgaatctcacccggatcataaattatgcctgtaagcattggtcttacaggctttttacataccttaggtatctatgtgctaaattttactacaaagacaatatttttttacatttgatattgtatgatacaaatatatgacaattattaacttaatcttacattattagtgaatcagttgactaaagtttggaacgagcttattctaaaattgatttccaaaaaataggatcgacaagtgtgaacgacaactatttttaacattatcggaggaattaagattgactacaaccaaaaaaatcattgttagattggcatgcgcgactgttcttggtacggcaggggtagcgctgacacaagtaaatataccacaaactgcagttgtgaacgctgcaactacctctgttgcagcccgcgcacttggagttgatgttgctagttatcaaaacgctgacttgtcaagtcatgcgcaagctggagcacaatttgcaattgttaaagttagcgaaggtacttcctatcgtaaccctaaggcatcaagtcaaatttcaacggctttatcaaataatatgatgccaatggcatatcactttgctacttttagttcaaatgcaagtgctgctgctgcagaagcaaattatgcagttcaagctgcccaagcattcggcttacctaaaggttcatatattgcttgtgattatgaaacaggttcgggcaataacatttacggtggtaaaacgccaacggctaatgcaattattgcttttatggacactataaaaaatgcaggctataagccacttctttatgctagttcatcagttttacaaaataatattgatactaatagtgtaattgccaagtatcctaactcattgtgggtcgcttcatacgctatttcaggtagaattgatagtccaaacttcaattacttcccatcaatgaatggcgtttcaatttggcaatttactgataattggaagggattaagcgttgatggaaatattgctgttttaccattatcaattgacggtaatgtaacttccaacaatggcgcaatttcacaagctccagctaccagcaacaccaattctgctagctcttcaaatgcttcatcaaatacttcgaataagagtacttcatcagatgatgataagggttcagcaactgctggctatgtgatgaagaaatcatatatctataataaaaagggtgagcgtcaaagcggctactatgcagcttatactaatattactcattatggtgtagtgactcttgataatggtaagactgccttaaacatgggcaatggtcgttacattatggcaagtaatgttttaggtaattcacgtgtacttaagcacaatgcttatgtatataataacaagggaaaccgcgctaactggagagtgcttagaaaaggtacgccaattaagacctatggttcacggatgcgcgttaatggtaaaagctgttaccgaatcggacgtaacatgtacgttaaggcggctaacttttaattaaaaaattgaatttatcaagaaggaattaagcttaaaggtttaattccttttttcatgccgttttttgtataattaaaagtattcagggaacgcctgaattaattaactgatagggatgaaataaacttgaaaaaaagatttatagcaataatattgatgctactgactttaacgggttgtactataaaaagtactacgcctaagaaggctaagtcgtcagttaaaacggttaaagtcgataaacagcaatctaaggaaaaacaggctaagtatcaagtgatagaccaagttttgcgaattcaacaagatggcgttgatatttatggtcatatatatctaccacagggtttagctggtaagaagaaagcagtaattttggctcacggattggcaggaaattaccgtgatctaaccagttatgctaaatatttagctagttgtggctatgttgcctatacttttgattttcctggtggagctaagaatggtcaaagtagtggtgtagatcaattaaagatgtcaatttttacagaagaaaagaatctacagctggtattaaatacaattaaaaataggactgatgttgaccgtaaacaagtgtctttgctaggcgagagtcaaggtggagcagttgccgcaatgctcgcaagtaaatatccgcaagaagtaaagtcattgattttgctttaccctgccttttcgatcactgattatgcgaaagcggcttttaaatcagaaaaacaagtgccagacaagctcaacctatttggcttcacaattggtaaggcctattttgaaaacttgttcaagtataacttgttaaaagaagcaactaagtatcatggtccagttttaataatgcatggtacaagtgacatgattattccagattcttattcaattatggctaataaaaaatttaagcactcgaaattatacttatttaagggtgcaggtcatgattttaaaggtaaatatcatagtcgagcagatactttaattgataaatttttgcagaaaaatgggaaataaataatgaagaagaaataccttggtttattggctttattaagcctattgagcgtttttgctatttggggtcaaagcgttagagctgatgttgattatgatattgataatgttagagccatagcaagagttaataaagatggttcactgacaatgtatcgaacaattaagtattcatttgatagtgatgctcgtggcctttattataagcaaaatctggctgtaaaacagaagttgagcaacattcaggttaaggtcgatggacaaaatataaaggccgcaacaacgggcaaaaataatacgtataaattgcaaaagcagggcaattcttataattttaaggtttatcatcgaattaaggaaaatgataaggttaaagttgagtattcttatctaattcaccgggcaattactaattatcttgatacagctgagctgaactttaaaatagttggtaatggttgggatactgacttagatcatgtgcgtgctgaagtgatttttcctggggcagttaaggggctaaaagcttgggctcatgggccactaagtggttacactcaggttttgccaaaagagggcaaaattattatgactgctgatgatgttgcaggagatagtggtgtcgaagtacatgcgatttttccaactacggtaactagtgctaatcagaatattgttaaagaaaataagaaaagagcaattgaaaaacaagaagcagcattagcaaaagaagctaatcagaagcgtcagcgtaagcagatgcttagtataggattgatgatcatttcagtacttgtcggttttgtggtgataattagaggcttttttattaaaaaagttggggttaagccaaaaatagagcgcgatttagtacataattatgaaattccagatatatcacctactgctgcgcaaattttggatgaagctgataaaccaaatgttaaagcatttacagcttatttgatgcaattagccggtaaaaataaaattaagatcgaaaaatatcaaactaaacatttaaagcggactaattatcgaattactttagtagatgatagtgttttgactgatgacctattagattttatttttaacaaagttggtgatggtaagtcatttacaacgaaagatttgcgggattatacttctaaaaaattgggtaggcgttttgataaatggtgtgacgggcaatataagcaagttgaggataaggacttgcttgataaaaaatataaaaagcagcgtagcaacttccgaacggggatgctcatgggaatgattgctagctttgcgatctgggtaattagcttaatgatggcaaataatatacccagttttgtgataataattggaatcatgatgatcgtcttagaagttgctgcattcatagtgggcaattctcgtttaagtatttatacccaaaaaggtgcacttgagacagatcaagttcgctgctttaagaaaatgctagacgatattggtcaattcaagatgaaagacgtcggtgatctgattttatgggaagacattatgccgtatgctgtagcgtttggtctatccaaaaaggtattgaagcagcttaagattgaatttgcagatgaattagatgctgcaccagttctgttttatagtggattctatagtagcagtagtgacagttttgagcatagttttgaacgtagcttctcttcaggcgtgtctactggtttatcttcagtttccggaagctcaggtggattttcaggtggatcgtctggcggctttggtggtggcagcggcggtggtgctttttagtgagaaatttttatactataattaaactaaaaaaggagggctaaattatgccatttgtacatattgaattaattaaaggtcgctcagatgagcagattactaacttaatgaaggatgttactgaagcagtgcacaagaatactggtgcgcctaaggaacacattcatgtaattatcaacgaattaggtaagcatacttatggccaaggcggcgagtggagagcttaataattagaaattgtagtaaaaggcgactcgattgtgagtcgcctttttatatagttaaatatataaacttgtattagagccttaaagctatgtgtgcataaatgaattatttatttagaatcccacgtaatataatgatgttgatgtctagatatttacgaggaggatttgaaatgaatttaaaaaagaaaattgcaatttctgcaactgcactgactgttgctctctctactgcatttccaattgctgctgcgcaaagtcagccggtaaaagcagtaggtattgtattggttcatcgtgttacagcaggtgaaaatttcgctaattggttcaattggcttagaactcgataaatagaaaaattaggaagcaggcaatataaagattgtctgctttttgcgtaaaaaaatttaatcactaaaacgatcaatcaattaacactacttcataaaaatcagtataattatgttcgttactattagtaagttatacaataaaagtggtgagaataatgtatgattatcgaaataatatcaaaataattttaaataaaactgaggctgatgataaaagtctcgaaaatagtttaagtgcgattaaagctatcctaaatatggccgaagataatacagctgaaaaatctgagactaaatcagtaactcaacctaagaataaaattgcaaatacacaatcaattgcacaaagaaatgcagatttaaagcaaattaagcaattattgattgggctgacagccttaattgagactccaggtgatgaaaaagctaaaaagagttcacttgatgctttacacaagttgacgtttgttccaggcgttggcaagcgctatggcaatgttttgggtaaattggatcaggcaattcaaaaatctaagacaactaaagaagctgttaacaagaaaatttttgaagaagcaatgaagcccaaagagcaacctaagcgcgattatcgtaaaggacgccgctatactgttattcgggctttatcaggctgtaatttgattaatgatagtggtcaaattgtttaccgtattaaagaatcacaaattcactctttgaatttaaagagcggtgacatagttgaagctattgaaaatcgagataatccaaattatgaagcagaagtcttgcgcgtggtgggttatcgcaaattgcgcatgcgtgattatgacccaatcgaagaattccggtatgctgtggtccgcggcaaggccaatcaattagctatcactagaaatattaagggcgaaaagttgagaattcgcggtaaggatatcacgattccggttgattcaagttattatcaaggtgaaaatattcatgttgaagatggttcaattgtagatctagcttggtatacgggtgatgttcgcattaagaaaaatcctgctgaggcagtacagattcgttggatttatcaagttgatccgcctaagaaatcagatctgtcgtatcaaaagaaaaataagtcaaagaaagaagaaacagaagagttaactaaactcgacatgaatttgcactatcagcgggtgggaattgcgattggtgataatcaaaatgaaggaatattagaagggattgtttcgcgctataatgggatcccaattccaatagatgcttttgaaggcaagaagaaggtaatggaacggcaaatcaaagacttagatattgtaatcttgatgacagcttatgctgctcatgatgctacttggaatattcaggaattcgcttcaaagtatggtgttaaatttgccgtttcttcatctaaaggctaccgctcttttgagcgagcattatatcgagctgaaaatggtttacctgcttatgaaggaacgcaatcaatcgattataaagaagttaaaaataaataatttgttaacattattttgtttgcttgagctaacagatgatttttcgttaaaatagtactaactaaaagaaaggacgcttaataatgaaaaacattaaacaacgttcctggatgagatggttggtatttttagcaggacttgaaataatcgcaatatcaatcaatcttttttatggaccgattaatattgcagctggtggctcaacgggtatttctattctagtcgatgcggtctgggggattaatcgatcaattacagtatttgtagtgaatggcttgatgctgattttggcggcaatctttttaggcaaaaagactacccaaaatattgcattaggtagtttgctcttaccagttttgatggaagttacgcctagctttaaagcagtgaataatgacctactagccgtaatttatggtggtgcattaatgggacttggagtttcgctactttatcgcgttaatgcctcaagtggtgggacaacaattccgccgatgattctgaagaaatatttttatttaaatcctgcaactacgcttttatgcattgatatggtaattattttcttgaacatttttgtcgatggttggaatgctttcttcttagcagcattttctcaagtggtaactgccattacgatgcgctacgcggagaccggttttgataaaaagtatcaagtcagaattatgagtaattcagatttagaccgaattcaagatatgcttaaagaagattatcaaggcctgacgatttatgatgttataggtggatatagcgacgaaagcaagcgtcaattattaatcgtagttgatccacgtgaatatgggccacttatttctaaagtacatgagatcgatcaggatgcgtttatcattaccgaaaatgttgcaaaagtgcatggcggtcaatggcgaatgtaaaaaaataattgatcttagtctaaaagcgttgtatgatataagagttgtatttgtggagacctccacatctgcaaccgcacggcttgaggttagaagtcttcttatgtaagaagcaccccagttcggcgagtctaagtatttttttcggaggtgtacaaatgtacgcaattattaagaccggtggtaagcaatacaaagttgcagaaggcgatagcgtatttgtagaaaagcttgatgctgaagaaggtagctcagtaacttttgacgaagttatccttgttgctaatggcgacgacgttaaggttggtactccattagtagatggtgctaaggtaactgctaaagttgaaaagcaaggcaaggaaaagaaagttgtaactttcaagtacaagcctaagaagcactcacacagcaagtatggtcaccgtcaaccttacactaaggttacagttgaaaagattgaagcttaattcagaggtgaaatgaatatgaacattttaggtatgaaattatacgctcaccacaagggtggtggttctactgccaacggtcgtaactcagctggtcgtcgtttaggcgccaaggctggtgacggtcaaactattcacgcaggtactattatttaccgtcaacgtggtactaaggttcacccaggcaagaacgtaggtcaaggtggagacgacactttatttgcacttgttaacggcgttgttaaatttgaacgtcttggcaagtacaagaagcaagtttctgtatacccagctgaagaagctaagtaattcagagattaacatgaaaaggcgagtagcataagccacccgtctttttttatggctttttccgcccagaaacatgtataattaaaccaatatcatacaaaaagagggtctctgagatggaaaataggcaagaattattatccttaattaaccagcgaattgagcatgtaactgatttaattaaagaagcaaatgcagatgcattgattatttttaatcaagctaattatcgatatctaaccaattttacaggggaagaagcacaattaattttgactgctagtggcgaacgagtacttttatcagattctcgttttgctggacagattaaagcacaagcacctggcgaaatggatgttgtaatgaaacattctagtgattatgaagaacttactaaggccttgaaaaaaatggacgtcaagagggtcttagttgaaggtgaattcgtttcagcgagtgaatatgaaaaacttaagcaactaaatccagaacttgaatttgtgatggttgaagaattggttgaacgagtacgtaatattaaagatgatcttgaaattgcggcattgcgcaaagcaattgatatttcaatggaaagctttaaaggtattttgccgatgattaagcctggcgttaaagaacgtgcaattggtgctaaattggactacctatttaaagttaatggcggcgatggccctgatttcgatacaattgtagcttccggtgtgcgttcggcttgggctcatggcgttgctagtgacaaagaattgtccgaaggcgatatgattgtcattgactttggtagtttttatcacggttatgcggcagatattactagaactgtttcattaggtgaagttgatgctgaaatgcataaaatctatgatattgtacatgaagcacaacgccgtggcattgccgcggcagttgcaggtaatactggatatgatgttgataaagcagcacgtgattatattacagaacaaggttacggtcagtattttggacacgggatcggtcacggcattggtcttgaaattcacgaattgtgtcaaccagctttaccttttagaactactaaattggtcaataatatggttcataccgtagaaccaggaatctacttgccagacaagggcggtgttagaatcgaagacgatattttggtccatgatcaaacgcctgaaactttatccactttgccaaaggatgaattgatttccctataatagctatttaatttatcgtatttatggtaaaaacgcttcaagattggtaagataataattgtagaaatgagggacttaatatgacaatgatttcagtaaacgaattcaagaatggcttgactattcaatacaacaacgatttatggcgcattgttgaattccaacacgtaaaaccaggtaagggtagtgcctttgtacgttcaaagcttaagagtttgagaactggtgctgtacaagaatatactttccgttcaactgctaaggttgaaactgcagacattcaaactaagtcaatgcaatacttgtacaatgatggctcaagttatgtattcatggatacttctacttacgatcaattagcaattccaaatgaacaaattggcgatgaagctaattacttattggaaaacatgattgttaacgtagttatgcacgaaggtgaaactttaggtatccaattgcctaatacggttgatttgaaggttgctaagactgaacctaacatcaagggtgatacttcatcaggtggtggtaagccagctactatggaaactggtttagtagttaacgtaccattcttcattaacgaaggtgacgttttaactattaacactgctgatggtacttacgtatcacgtgcaaataagtagtttatttgaggtaacaaaatggcagatagttcaaaaattcttttaagtggtgaagaaaacagcgagcaaattaaaattgatccaagtgttctagaagttattttgggtattgctgcagaaaaagttgatggtgttgccggaatgcgcggcagtttgaaatcaggcttaaactgggttttcggtcgtgaagatcatggtaagggcgtaaatattagtgttgatgacgataataagctaattgctgatatttatgtttatcttgaaagcggcgttaacgttcctaaggttgcaatgacgttgcaaaagaagttgaaggcacaattattgcaaatgactgatcttgagctgaaggcaatcaacgttcatgttgtcggtttagttttcccagaagatgaaaatactgaccagactacatcagagctgtttccggaggacgaagaagaaaaataatgaaccaacacgaaagtcgaaaagttgctatgcaagccgtttatttggctaatcaggagccagatttaactgccgaagaagttgaagcaaaagtcgttgcaacgcttaatttaaaacagctttctgcctattctaagaagttaatcgaaggcgtactagaagatcgcaaaaatttacagtctgaactaactagtcatttgaaaaagggctggcgtcttgaacgtgtgagtcaaactgtggtagccatcatggaagttgctttatttgaaatcaagcatagcgatgaaattgatgctaaggcagcagttaacgaagctttaaatttatgtgacgaatttgctgagcctaaagaaaagccatttattaatggaatgttagcaaactttgttaaatagcgatgaatagccggcagttttgccagttatttttttacaaaaggagaacgggctttatgggaaagattcttgatggtaaagcatttgcaaatgaattagggcaaaatcttaaagaaaaagttaagaaattaaaagaagagggaataacgccacatttttgcgtaataaatattggggatgatcctgctagcaagatttatgttcgaacaaaaaagcggcgggctgaaaagatgggaattatccaagatatttatcaaatgcccgctgatactaaacaggaagaagttttagcattaattgataagctaaatgctgatcctgagattaacggcttgatggtacagttgccagcacctgaacagattgatgcagatgccttgttaaaaaggattgaccctaataaggatgtcgacgccttaacgcctgcgaatattggtcaactttggatggaaaatcactttgttgaaccggctactgcagaaggcattattgctttattgaaacattatcaaattacgctggctggtaagagagttgtagttattggtcgaagcaatatcgtaggcaaaccagtagcggcattaatgttagaggaaaatgctactgttactgtttgccatttgtatactaaaaatctggctgaaattacacgacaagccgatatagtagtttcagcaacaggacaagcatttttggtaactgcagatatggttaaagatggggcagtggtcgttgatgtgggcatgaatcatgttaatggcaaattagtcggagacgttgactttgataatgttaaagaaaaagccagctatattactccggttcctggcggtgtaggtcctcttacagtacaattcttaatggaagcagttgttaaattgactaggagacaaaatggccgagaataaatatttaacggttactgatttaaattattatattacgcaaaaatttaagaatgatccttacctgcataaggtcttcttacaaggtgaattgtccaacttccgttatcggcgtaattcgcaccagtatttttcactaaaagatgaaaaatctaaaattaatgtggtgatgttccgttccttctttgataaggtgaaatttaaaccagaagaaggaatgaaggtttatgtggttgggtatgtcagcgtgtatggcccacagggctcgtatcagttttatgctgaacaaatggaaccggcaggattaggtgccttatatgagcaattgaagcagttgcaggccaaattagccaaagaaggtctgtttgatccagagcataagaagaagttgcctcattttcctgatcgaattgcagtagttactagtgcttctggggcagttattcacgatattatggttacagctaatcggcgtttcccgcatgctgagattgatttgtatcctgcgcaagtccagggtgatactgcagcggattcattagtgagagcaatgcgccagattgccgctcaaggcgacaagtatgatgtcatgatcatcggtcgtggtggtggctcactagaagatttgtggccattcaatgaagaagaggttgtgcggcaagtttacgcaatgcagatgccagtaatttcttcagttggtcatgaaacggatactaccttgtgtgatttggtggccgatgcgcgtgcagcaacaccaactgctgcagcagaatatgctacgcctaatacattggacgaaattgcgcatattaagcaattaaccagccagttggtagctagcatgcaaaatattattcgttcgaaacgtgagcgcttaagtcgggtgcagaattctgtcatcctgcgcgagccgactagactgtatgatcagcagattcaacaagttgatcaattaaaacaaaggctgcaaaatagtatgcaaaatcggttgacccattctgtccaaggttatcaactgttgaagcagcgtttgtttagcgttagtccagataagagaatcggccagatgcagcaacaagagcattttttacagcaacgactgattgataatatgcagcactatttgaaaaataaacgcaatagttttacccaagtaatgcagcagttggatgactatagccctttgaagacgctagagcgaggttttgtttattcaactgatgaacaagggaaaaccattagttctgtgaaacaagttcaaaaggatgatcatttgcgattgcattttaaagatggacaagttgaagcagtggttacaaaggtaaaggaagaacaaaatggcagtgaagaaaaataattttgaagaacaattaactaatttggaacaaatcgtgcaaaatttggaaaacggaaatgttccgttggaagatgccctaaaagaatttcaggagggcgtaaagattagccgtgatttagaaaagaagcttaacagtgctgaagaaactgtggctaagttgattgatagtgatggcacagaacacaaattagatccaaataacgcatcagcaccagaggaataaatatgacagcatttacttattttaaagatgaatggaccccagtaattgatgattatctggctaagcatttggctagtgaggttgaagatcaaaagatcagtcagattatggcctactcagtgatgggtggcggcaagcgcttgcgtccgttattgtttttagctacgttaaatgctttaggcagaaagattgaagaacctgaaattaggattgcctgcgggattgaactgattcacacttattccttgattcatgatgacctgcctgccatggataacgatgactatcggcgcggtaagctgactagccacaaaaaatggggcgaggctgaggcaattttagctggggatgcgctcttgccgatgggaattcaatggattgcggaaggcagtaagtcggcgaaattggtagatttaattaccaaagcagttggccctaatgggatggttggcggtcaatatttggatattgattcaactaacaatgctagtgttgcgggtgatgccaagtttatcaataagatggaatggctgaagaccggttgcttaattcaggctagcgttgagatggctgcagtttatgcaggagctagtgatattgaacaggtaaaattagtcgattttgccaaaatttttggtcgttcataccaaatctatgacgacttggttgatgtcgttgaaactagtgcagaagctggtaaagctacgcacaaggatgaagctgaaggaaagaataatactttaactttgttaggaattgatcaaagtcgcaaagaactaactgacttaattaagcaagcacaagatgatttgcatggactaaatggcgaagtgctaactggctttttagatctttatcaaaaggtgttataaatggcaaaacaaagagcagatattttattagcagaacaaggaatttttcattctcgttcagctgcccaaagagcgattatggcggggctggtttctgatcacaatcatcaacgaattgataagagcgggactaagtttcctgaaggggaaaagttttacgtgaaagatgatggtaagaaatatgtttcgcgtggcggctttaaactggaaaaagctcttaaggtctttgacattgatttaacaaataaaatttgtttagatattggtgcatcaactggcggttttactgatgttgctttacaaaacggtgctcagatggtctatgccttggatgttggctacaaccagttagcttggcaattgcgggacgacccgcgtgtagtggtgatggaaaagcagaatttccgctattcgaagccggaagattttgatcaaggactgccagattttgcaatgaccgatgtgtcctttatctcgttagatttgatcatggcaccgatgtatgcaattttgaagaatcaatgtgatgccgtttgtttgattaaaccacaatttgaagctggccctgagaatgtcggtaaacacggtattgttcatgatcatgaagtgcacaaggcggtaatcgagcacaccatgcaaaaggcattggagatcggcttcaatgttttaggcgttgattattcaccaattaaaggtggcaaaggcaatattgaattcttgattcatttacaaaaagacgaagcaaatggtggccgcaacttatggcaagggagcccagctgaagtggttgagcgcgccgtaagtggtctataggagtgaagctatgctagttgagctagatatcaaaaactttgcaattattaaaagcttaaaggttcgttttcaagaaaaaatgacggtaatcatcggtgaaactggtgctggtaagtcaattattattgatgctgtttcattactgatgggtggtcgcggtcaaaaagaaatgattcgttcgggtgagtccaaggcgattattactggcttgtttgaattggatgatcaaaaagaaaagatcgcggaattgtgtgatcaatatggtttgccgcacgatgacgatcagctggtgattagtcgtgaattagctgtcaagggcagaaatgtagtccggattaacgggcaattgacgacgattaatgttttgcgcgagattggtagctatttggttgatattcacggccagcatgatcagcaaattttgatggatcaggaccggcagattgacctagttgataattatgcccctgcttcttttaaggcagatttagccacttatcaaactgattatgctcaatggcaaaagctaaccagtcaattgctgcacctgcgtcaagatgcccaagaattagctcagaagcaagatattctgcagtttcagaataatgaattggaagcagccgaccttgaggatccacaagaagatgagaaacttgaggaagaatataacgaactaaataattatcaaaaaattgcggatacggcgaattacttcatgcaattgtatgatgacgatgagcatggaattgcaactttacttggagatgcgcaaaatgctgcgactgatttaactgaatttggttcaaaatttaaggattttgctaagacagttgatgatggagtttatgctttaaatgacgcccgcagtgaattatcgaacttaatggatgcaatggacttcgatgaggaacgttttcaatacgtgactaaccgcttggataccttgaattcattgaaaaagaagtatggcccaaccttggctgatgtgtttgctttttatcaaaaagtacaaaaagaactcagtcaatttgaaacaggcggccttgatgaggaaaaattgcaagcagaagttgccaagattgaagaaagaatgacccaagaagctagagatctgcatttaatacgcgaaaaagtggctcattctctggaagagcagattaagcaagagttagctgatctctacatggaaaaagctcgcttttctattaattttgatgaaacaaagacatttaccgataagggaactgatgcgattgttttcttaattgcacctaatccaggtgaagatttaatgccattagttaaaattgtttctggtggtgaacaatcaagattgatcttagctttgaaggcaatcttcagccgagttgaaccagtgggtaccatgatttttgacgaaattgatacgggagtttctggccgagtatcggctgctatcgggaaaaagatgcactcaatcggtcgcaacaagcaggtaattgcaattacgcactcaccacaagtggctgccgcgggtgatcaacgctacttggtagctaagcaagtaaaagatggttcaacctttactcaaataggcccacttagcaaggaagaaaccattacagcgattgcacagatgatggctggacaagatgtaaccgatgcagcaaagaagaatgctgcagatttgattaagagtattaaagatgactagtattagtaaattttggcgtgatttttgtgtagaacatcaagtaagtcctacagcattagaaggtgcttttgcttttggagctaatagccgggatgcagatattcttagtgatttggtcaaaagtggaattaagacggcaacgactagcctgtattctgcgcaagaagatgtaccggttgtagggatgtacgcaattgttttaaatggacgaaatgaaccagtttgtgtgattcaaaataagactgttgagattatgccatttaaaaatgtctcagctgagcatgcctatttagaaggcgagggcgatcgctcatatgaatcttggcgtaaagtacacgagaaattttttgcgcgcgaatgtcaagaactgggacgagagttcacagatgaaactgaagtagtgtgtgagacattcgagaaaataatttagtaaaggagcagacgattttgtctgtttttttgtatgcaaagagaaaacttgaaaaagaaacaattttagtgcaaactagatatattacaagttaagaggagttcagcatggcagataaaggtttattacttgtgctttctggtccttccggcgttggtaaaggaactgttaaaagcgcgattgttgaaaacaaagtctttccatttgaatattcagtttcaatgactacgcgtcaaccgcgaccaggtgaggttaatggccaagattatttttttgttagtgaagatcgctttcaagaggctattaaaaatggtgagttgttagaatataataaatatgtcggtcactattatggtacacctcttgcaccagtgaagaagatgcttcatgatggcaaagatgttttacttgagattgatgttaatggggcacaaaaagtacgtgaaaagatgcccgatggcgtgtttatctttttaaccccaccagatctacatacgttacatttgcgtttggaacaccgtggcaccgagtcagaagatgtaattcgtggtcgaattaagcaagcgcgcaatgaaattttggagatggaagactatgattatgcagtagttaatgatacagtagctaatgcagttgatcatattaaagcgatcgtcgatgcagaacatgtcagtgttaaacgtgtaattgatgactatcgtaagatggtcaaggaggattaattattatgagaattacttacccatcaattgataaattattgtcacgtgttgattcacgctattcattatctgttcttgccgctaagagagcacatgaacttgaagctggtgatccaccaactttggaacattttaagtgtgataaggctgttggtaaggcacttgaagaaattgctgctggtaaagttactgttgacccagctcatgccgaggttaacctcgaagattaatttattgaccttcatcctttggggtgaaggtcttttttacaggtgattaaatgattgctcaggttattgttgatgtagctgcacggcaaacagaccgtatttttgaatatcatattccaacagaattagaaaaggatattgcgattggatcaagagtagttgttccgtttggtcctcgtaaagtgcaaggttttgtggtggggatcactgatcaaagtgaatttaaaggtaaacttaaggatttgctagttgtggtagatgagatgccaccgcttacgccagagttggtaaagttatctgctgatttagcaaaaaatattttttcttaccgaattaaaattttacaagcgatgctaccttgggtaatgcgagcaaattatcgcaaattgctagtgccagctaatgatagagctgccaaaatgccgctgtttcagggtgatccaattgatttaaataaaattacggatctggcggagattaagcaattccgcaaattattgcaagatgatcaagcaaagattgagtatgtggtagaaaatcgagccaagaagaaaaaagaaaatcaatatgaactagcattaaaaaaagaggaatatcccaaaatttacaatactttacgtcaaaatgcggtaaagcaaaaaaagttattgatggatatcattgataatgcagcggattatcccaaaagccaaagccagctagaaaaacagcttggattgacggcggcgagtttgaattctgcgattaccaaaggttggttgaataaaaaaagtgttgaggtttatcgcgatccgttatccggatttgatgacggagaacataaaacagcggttaccttaaatggtgagcagcaaggtgctttgaaccagatcacccaagcaattgaacagcgccaggctgagacttttttgttggaagggattactggtagcgggaagactgaagtgtatttacacgctattagcaaggctcttaaacaggggcgaaatgcattaatgctggtgccagaaatttccttgacgccgcaaatggttcgtcaggttaaggcacgttttggtcaagaggtagccgttttacatagtgccctatctgagggagaaaaatatgatgagtggcgccgaattcgtcgtggcgagactaaggtggtcgttggcgctcggagtgcagtttttgctccactagataatattggtttaatcgtgatcgatgaggaacatgagtcttcatataagcaagaaaccgatccacgttataatgcacgtgatgtggctatttggcgtagtaaatttcataattgtccgttggttttaggaagtgcaacaccatcgttgagtagccgtgcacgcgcccaaaaaaatgtctatcatcttttacggttaactgaaagggctaatcaaaagaaattgcctaaagttaatttgattgatctaaagcacgtgcagtttgctggtggtcaatttgatttatctgttgagctagtagatgcaataaaaaagcgtttggcaaaaaaagagcaggttattttaatgctcaatcgacgtggttttgctaattttatgctttgccgtgaatgtggttttgtattaaaatgtcctaattgtgatgtttctttaaatttgcataaggatactaacagtatgcaatgtcactattgtggtcatactgagccagtacccacacgttgtcctaattgccaaagctcgcaaattcgttttttaggtgcaggtacacagaaggtacaagaagaattagaagagcttctgcctggtgcacgaatcttgcggatggacgttgatacaactagaagaaagggtagctataagaaaattctagatgcctttggtgctcatgaagctgatattttgttaggtacgcaaatgattgctaaaggattagatttccctaatgtaactttagttggagtaatcaatgccgatacaggattatggctttctgactataatgcttctgaaaagacttttgaattattaactcaagtagctggccgtgcaggtcgtgctgataaggaaggggaagtcttaattcaaacttataatccagagcattatgctattcaactagctcaaactcaggactacgaacgattttatggctatgagatgaatatgcggcatgctggtaactatccaccatatttttataccgtgctgatttccattgctgctaaaaaagaacagaatgcagctcgtgaggcttttaggattaagaggtatttgaatgagcacttgcatgagccaacgattattttgggaccaacgccaagtgcaatttctcgtgtaaaaaataaatattattatcaaatactggtaaaatataaaaaagaaccaaatttaaatgaattattacaccatgttcaagattccgcgcaggaagctaagaaatatggtttaagtatttttattgataatgaaccagagagaattatgtaaggggatgctttaatgacatcaataatatttatgggaacaccgaaattttcagttccagtacttgaagggttaattgatgaaggctatgagattaaagccgtggtcactcaacctgataaaaaggtaggacgtaagcagaaaattactaagtcaccagccaagatcgcagcagaaaagcatgatttgccaatctttcaaccggttaagttgtctggatcagacgaaatgcagaaattaattgatatgcatgcagatttgattgtaactgcagcatatgggcaatttttaccaactaagtttttgaattcggttaaaattgcggcagttaatgttcacggctcacttttgcctaaataccgtggcggtgcaccaattcaatattcactaattaacggtgataaagaaactggaattaccattatggaaatggttaagaagatggatgctggtgatatttatgctcaagaagcaattaagattgagcctgatgataacgctggcactttatttagtaaattatcaattgttgggcgggacttattgcttaagactttaccagcaattattgatggctcaattaaaaaggttccacaggatccagaaaaggtcgtcttttcacctaacatcactaaagaacaagaaaagcttaatgttgatatgacagcagaagaggccaacgatatgattcgtgctttgaatccagatcctggtgcttatttgatgattgaaggcaaacgtttcaagatctggaaggcagaaattgcatctgattcatcaagtttaaatgccggctctgttgttgctaacaaaggacgttttgccattagttttgctgataattcagtacttaacttacttgaagttcaaccaagtggcaaaaagagaatggacatcaagagctttttaaatggtcaaggtagtaagtttgtcccaggtgaagaaattgtcgatcgataagagtgcacgtgcagtcagcttagagacattgatcaaggtcttagatcaaggctcctattctaatattagtttgaataacagcttaaagcactctaacttgtcaattgcagaccaaaatttagctactaatattgtttatggcacgattcagtatcgattgtttttagaatatcagttaaaaggcttagttaggacaaaactgaccgaaaaatatattaagccattattgttaatgtcactttaccagttgatttttttggataaagtgcctgatcgtgctgtacttgatgaggctaataaacttgctaagcaatatggcaagcgacattcagctggctttcggttggtaaatgggattttgcgttcgtttactaggcgcggggtgattttaccagctgaaaataatccagttaaatatttaagtgtcaaagagagcgtacctgaatggttagttcaatatttaattgataactggggcctagacaaggcaaaatcagttttaaacagtattaatgagccagctaaaaacagtgtacgtatttcaaagttggcagataaagagcaagtttttgcccagttagagcgggataactatcaaccacaatggtctaagttatcaagcgatgatgtgattttgagtcacggtggcattagcgaaagtgatttgtttgaagaaggcaagttaacaattcaagatgaagctgccagtttagtcgtagaagcttttgactttgaacaagatgagcatgtgcttgatgcttgttctgctcccggtgggaaaaccgtgcaaattgccgaaagcattgttaatggtgatgtgactgccttagatattcatgataaaaaattacgtttagtacgagataatgcccagagaatgcacgttgcaaataaggtaaagactaaggcatgtgatgcacgtaaggctacagagatttttgcggcaggtgaatttacaaaaattttagtcgatgccccttgttctgggcttggattattgcgtcgtaagcctgaaattcgctatactaagagacaacaggacttacaaaatttacaaaaaattcaattggcaatcttaactgcagtaagttcactcttaaaaaagaatggcgagttggtttattcaacttgctcaatttcaatggaagaaaatgaagaggtagttaagaagtttttgcaagcacatcctgactttgaactagttccatttaagttaactaaacttgaatcaaagacagggatgttgaaaataatgcctgatctagatggcaatgatggatttttcattgctaaatttaagttacgaggttagatttttgattgaaacagcatacgcttcgagtattggtaaggtacggaaaagcaatcaagattttgtaaaagtttttaaaaatcaaaagggaattgtcttagcaattgtctgtgatggtatgggcggccatcaaggtggtgacgttgcttcaacaatggcagtcacccatttaggacataattttagtatgactgactttgcagatgctaatctcgctcataaatggcttgatgtgcaattaaattctgaaaatgaaacaattttaaagactgctgataagtttcctgacttaaatggaatggggacaacgattgtattggcgtttgcatttgataaaaatgccttaattgctcatttaggtgattctcgggcttatagttattctgaaggtaaatttgtccaattaactgaagatcattctttggttaacgaattagttaagatgggtcagattactaaagaacaagctaaacaccatccccagaaaaatattattacgcaagcattaggcgtctcaagtacgattgatcctgaatttgatgagatcaagatgggggaaaacgacattattttgctctgtactgatggcctaaccaattcacttagcgatccacaaatccaacaaattttggcaactaaggagcttagcttaagagaacgttgtaataaattgattagtgaggccaatcgattaggtggtggtgataatattactgtctgcttaatttggaacaaggaggacgagagcagtgatcgataaaggttatctgcttggggaacgttaccgcatcatcgataccttaggtgaaggcggaatggccaatgtctatctagcggaagatattatcctgcaacgtaaggtggcagttaaaattttacgccttgatttgcagaatgaaccgcaaacccaagctcgttttcaaagagaggcattagctacaagtgaattaagtcatcctaatattgtttctgtacttgatgtaggtaccgatcatggtttgccatacatggtaatggagtatgttgatggtcctaatctaaaagaatatattcaaaaaaattcacctttggatttaaatgaaattattcgaattatggatcagatattgagtgcagttgcattagctcataagcacaatgttattcatcgtgatctaaaaccacagaatattttgatggataagcgcggcaatattaaaatagctgatttcggaattgccgttgctttgaatcaaagctcgattacacaaactaattcagtaatgggttcagttcattatatgtctcctgagcaaacgcgtggcggaatggttactaaacaatctgacatctattccttgggaataattttatatgaattgatcacaggaactgttccgtttaacggtgatacaccagtggcaattgcactgaagcatgcgcaagaaccaattccttcaattcgcaagaaagattcaagtgtaccacaggcgctggaaaatgttgttttaaaggcaaccgcgaaagatccacgagatagatatgctacagctcaggaaatgaaagcagatttggatagtagcttggatcctgaacgggcagatgaaccggtttttgtaccatatcatggtaataacgatgataaaacaattgtattgcctggatttaagccacaaaaggaagaaaaagaagtggtggagccagcaaaaaccgaatcagtagaatcaagcaagctagtaaagaaaaagacttttttacagaatgtcaaaagtcacaaatggtggtggctgatctcaattattgccgcgggtttaatcatttttatgatgattttcgctttaagtggtactggaaataaacgacaggatgttaatattcctgatgtaactaatattgcagaaaaagcagctgagagtaaacttgaagcagcaggcttacaggttggaaaaattattaggcgacaatcagatgatataaaaaaaggccgggttattgcgacaaaaccaactgcaggcaatagtctagagcggggaaagagcgttgatttaattgtttccagcggttctagcatggttaaagttcctgatatggttgggaagaactatgccgaagcggcagaaaaattagaaaatatgggctttaatgtagttagagaggaccaatattctaataaagttgacgaaaatcaagttatttctcaaagcattgctgcaggtgtagaggttaagccgacgcagactacaattacgttgatagtttcacgtggcaagcaggctagatcacattcaaatatggttaccttgaaagacttaagtaattattctttgaagagtgctcaagactatgccaaagaacatggcctgactttacaaatcaatcaagaatattctgatgatgttgagaagggcttagtaatttcgatggagccaggtccgggtactaaggttgagcgtggttcaactgttaccatcaagatctcgaaaggtccaaaggaagacaaggaaactactgtaactaagacctttaccgttaactatgttggtgatgatctttctaagagtgagaagcctgataatgataaaggaagcaataactctgagtcagaatccgttaatggcaagggtgatcatgtccagatctatattaaggatgatgatcattccttgaacaatatttatcgtgacttgtatattaagcatgatatgagtttctcgattccatttaacattagagaaggtagtggacaattaaaggttgttcgcaatggcgatacagttttgaatgaaaaggtgactaaataaatgaaactagcgcaaggaaccgtcgttggtttgattgctggttattatgatgtagaaaccgctgcgggtatcgtgagaacgcgtgctcgcggcgtttttcgtcaaaaaaagcaaaaaccggcagttggcgatcatgtggaaattcagatagatgataaaggaatgagctatctggtgaaaatcttgccgcggattaatcgaattgggcgaccagcagttgctaatgtaagtcatgttttgttagtaatttctgcagtagaaccggatttttctgtagagctgttagatcgttttttgactttcttttcttggcaaaaagttggtgtaacaatttacttgtctaaagcagatttgctatcagaagcaaagttaaacacaatcaagcaagctttagcatattatcaaaaaataggttatcttgttttcactgattatcatgaaatgcaaattcagattcctaaaatgatcgaaaaaaatcaaatttggactttagcaggacagtcaggtgctggtaagtcaactttgcttaaccatttaaaaaaagatgctaatcaagcgactggtgcgatatcaactagcttgaatcgtgggaaacatactactagaaaggtcgaactttttaagttaggcgcgggctttttagcagatacgccaggtttttcgtcaattgatttgacaccaatcaagttgaatgagttatgtaattactttgttgagtttaaaaaggcaagtattcactgtaagttccgcggatgtcagcatttgcaggagccaggctgtgaagtaaagaagttacttgaagccagagaaattctggaaagtagatatgaggattatttggctatgcggactgagattagcgaaggtcgcataccggaatatttaaaatagaggtaatagctgatgatgattgcaccctcaattttgaacgcaaataatattgatcttaaaaatgatattgaaaatgcagtccaggccggaattagccgttttcatattgatattatggatggacattttgtgcctaatttatcttttggaccgcaactaatcaaagatttcaagcgtgaatttccgatgacagatgctgaaattcacttaatgagtgatgccccagataagttggtaccagcttttgttagtgcaggagcagatttggtcgaactacactatgaagcaatggacaagcctaagttatattattggttcgattatttagcttctaatggcgttgatgctgctttggcaattagtccagatacaccagttgaagtggttgaaccgtatttgccattactgaaacaagtattagtaatgacggtcaagccgggatttggtggacagagttttcttcctgaatcagttaatcgaattaagtcagttagagagattgtcggctctgattttgatattgaggtcgacggcggtattaatgatcagactattaaattagctgaaaatgctggcgctaatatatttgttgttggttcatacttgtatgaaaatggtgatgttggcagtcaagtacataaattagaaaagattattaagtaatgaaagcatatgcattgttgggcggtccaactgaattgtggcctgaagatattgaagaaaagctggctcaagctgatttagttattggggttgatcgtggtgccttgtttttagaagaactgggaataatacctgatgtggcagtaggtgactttgattctttacacgaaaatgacttaagccaaatagaaagtaatgttcaagacattcgttattctaatcctgtcaaggattggactgattctgagctaatgttgcagattgcttttgaagattatcatgtggatgaattagtgatttttggtgctacaggtggaagattggatcattttttgatcaatctattaatgttgctaaatcctgaaatgagattatatgcgaaaaaagtaacgttgattgaccaacaaaatctaatttgcttttttaatgcaggcacgcatgttgttcaaaaaagaaaaaattattcttatattggttttgcagctttaaaagcaatcgaagattttaatattattggtgcaagatatgagttgaagcactattctgggaactatcctcgtgttttttcatcaaatgaatttttgcctaatagtaatgaattcaggattagcttgcaaaatggtatgattgcagcaatttattctaaagatattaatcgttttcatgatttataggttaaaatagaactatagaaaagaaacaagggaattcaaatgaaatatattgactttgaaaaagatattgctggtttcgaaaacggtcgctacgaagcaagacttgaccgtgcaaaataaaatgtagaagactacatgtacaagaaccacgttcacatttttgataaaaagaagaagaaggaagtagctactatcaatggcttagctagaaatgtaacttatcaagatttggacttgccaactaaggtgggtgaaatgattactgagtatgcatacacgccaattgatgaaagaatggccgacgaaattcctgatgacgataagcatcacaatattatgaagtaaagtaaaacggtaagaagacaaaataaaatggtcttcttaccgttttttatataaatcattaaaataagtaaaaaaataagcttgcaagatcagtgatctaacaagctcttggtctattaggcacgagtaactttaccagactttaaagccttggttgaattaaaatataggtttttagaaatatttataagctttaaatcgttgatattataggatttaatgttttgcaatatcatagaatttttcacggtgttgcacaaatgttgcacaaacttgattgagtgaattaataattttggcatcttgttgatccttatattcatcaagtaagtgagcatagattgataaagtgattgctatattagcatgtcctaagcgtttactgatagcagctatatcaattccttgagaaattaagtatgaaacatgggtatgccttaaactatggaagtgaaaatcaggtttgttaagtccaatttccttaatggcttttcttaagaattgatttacagcagaactagaaggtggtaatccagttctaggaatagcaaaaataaattcagaattattaatttttaattgtttcaatttatctaataagaaagaattaactttaatctttcgaactgaactttcggttttagttggtcctagtatttttaaattaggattccaggttttattaatatcaataattttattcttaaaatcaatatcagtccattttaaagctgttagttctccaagtcgtgcgcctgtaaataaccccgctagaactaaatatttgctagtataacgaggagttaaatttgttaagcataattgtaccagcttattcatttctccttcattaaggtattctatggctctgacattgtcttgatttcctgtgatggttgtgcgattggtaaaattcttaacgattaaaccatcctctattgcatttcctgcacaagctttaaccataatattggttttacgaactgtagcaggagcatggtttttaccaagccaatttaagaagctttgatatttagctcttgaaatatcttttatttttgttgatccaaaatatttttcaagataatgataattggtaatatatctcttttgcgttgattttctgataatcgggaatttaaaagtaagataccagtgttcaaaatagtcagcgaacacagggttcttaactacatctacaccatcaatagaagcggcttccattttaattccgtactgttgtgcttcagacttggttttgaaaccgccttttgatttttgttttaaaatagaaacattcttttgtttttctggatcccattgagtttctctctttgaaaatcttacataccaggttttgccacgttttcttattgatgccattttatttttactcctatttttgctaaaatagggtagacgaaataagccgattccagtcggtttatcgttactctattacattataagtattattaagtttattgagttgcgctcacttactgttccagcagtaggtgggcttttttgttttatagattaattccacttatagttatcataaacatcaaatgtggaacgtcccatttcattattgtcatcgtcaaatatttgtgcccataaacgattgccaactttagacttactaattaagccataatgataagcatcccatgtagcttctttgttaataccacgcatgcaagtagtcttatccttgtcagataaattaacaaaacgatcattaacttccacagataagttagctttggaattaacagtaactttgcttacatattttgaccaattagtatctggatcatttttagaacggaaagccttaatgtttttaacaattaaagcattagtttggttagctttctgctttttaattgcattgctttttttagccttttgactttcaattctttcttgtctctcaatatttgcggtgctttgctcattagaatgtcttatccataagaaccctcccactaaaaccgcaattattataataaatcctattgcacaaccaacagaaccatctttattgtcttcttttttatcagtcatttgttttggctccttatttctttcaggtttaacgtcactgtggacgttttaaaacacaacagggttatgcagactttgaatacaatagcttcgacaaatatccatttttatcgtgttattatttctaaatgctaatgtatattccaaagcagcattaattgacattccaatagtataatgcaaaaagtttttaagtctgttatgtaatgctgctgagctcattccataaatgtctttcatttgattaaatgatttattcataatttctttttttaatgaatcttctggaacataaacatttgaagcaattatattagcttctgtttcaatgggctgaagctcttcaggataaggatttccttggctcttttgcgcatttattaaagcaacagaacttttatatgtggggtcgtctaatgcttgataagcatgtgaaagctcatgaataatagtaaatattattcttccccaagtattaatacttgcatttaaaaacataattggtccactagcgggaaaaagggtaaagccgcagactctatttgcaaaagtagtacttacttcatcaatagattgcgctgtaaatgaaatatttctagcagttaatccataattaaaatcatttaaagcattttgaccattattttcaaaagggaaaattaaattaggtgtataagcacatatatcgcatgtcccgattatcgaataaagatagttaataaccattggataccttacctctgatttaggtacattgtattttaaagcagtatcttcaactatagaattagcaatatcattgctactttcatatgaatcttctggtattaatctatattcgtatccaggcatattatttttcactctttctacgtcttttaacaatttgctttgcagtgttcatcaaaatacctaaagaatcttgaaaatcttgtttttcttcatttgacattccatcggtttcttttctaaacattgctaaaagttcttgatcatttttgttcagcgttacagattcatctgtaacatcatctaagacttcacttaatggtactttaaaaaaatcagcaaccttttgtgcactagccgttgaaggctttttcgtttcccatttgctgatgattccgttacttaaatccatttttctttctaattcagctactgattttatatcaggtcttctttctttccaaagcctcattacattgtctttcgcactcattttatactcctttattttgacacgacataagaaatagaacaaaatctaaaataaatgcttgcaatttagaaaacgggctattataataaaaactgttcaaaggaaacatagcaaaaaatcttttgaaccgccttttgtaagcataggtcttacgatttggcttatttcttatactcatataatagaataaattctattataaatcaatataaaatctaagaaaggagtctaatatgtcactttattcagtgattaaagacattgcaaaggaaaaacacaagtcaatttatcagattgaacatgacttgaagatgtccaacggaatgatcagcaaatgggatagaagtatgcccagagctgattcattacaagatgttgctgactacttaggagtaacaacacaatttctatttaagttagctagagaagataaggaggaaaagtaattatgaaactcttagattttgaaggtcagtcagttttagacagccgagatgtcgcaaaaatgattggtaaagaacacaagaacttaatgcgtgatattcgtacttacatcaaagatatagaggagagctcaaatttgagctcacgtcagttctttattccaagcacttataccagtaagcaaggaaaagtattacctaattatctgctcactaaacagggatgcgagttcgtagcaaataagatgactggtaaaaaaggaaatcaatttactgctcaatatgtgagtttgtttaatcaaatgaaacaacagattgaaattccaagtaaattcaatattcctaaaacattgcctgaagctttgcgtttagcagcagatcaggcagagcaattagcaaaacagaaaccaaaggttgattatttcgactcccaaatgagaaaccctggtcttatgacaactaccgaaattgcgaaagattatggttggtcagccaaaactttaaataaagagttgaataaacgtcacattattttcaaacaaggtaaacattgggttttatatcaaaaatatgctgacaaaggttatacgcaatatgaaccatatgattatcaaaaaaataatggtcaacatggagttcacaacaatcttaaatggactcaaaaaggcaagaaattcatttatgatctattagctaaagatgatattcatcccgttgcagaacaaatgaacttgttagaagtataggccaggtgatgacaatgcaactagtcattaatgacactgaacttcaaaaagcagttgatcaaattatgaaagaacgtggctatgtccctgaagagcaactgcaaggaagaacaatcagtattgatgaatttgctaagaaatacgctaagccacacggacaagcatgggtaaaaagaaatattctttatccatttcaaccggattggtgtagcaatattcatccaggcagaggcggtaagatgacaatctttgaatatccagctgctatttggatgaatgaacatagaaaggaaattgattgggatgctaaataagaattattaccgtgagtttaataaaccaatccaacataaagaaagccattatgaaactatctttggtggcatcttaatagcagtcgtgatcttaacgttcactcttttgtgctatggcttttgggatgcagcatttcaaattattggaggttaactcatggaacttagcaaagaaacacaacaacgaatttgggcaattactgatgtagttactagtcagtacgaaacagggagaaaaccatcatggaagcaaaacaaggaaaagaattagctaaagaactcaactaccaaaagattgaaaaacagcgtgatttttatgctggttgggattgcttaacggtagttgtagggaatacagttcatgcaattggtcagaattgtgagtacagaacaccacttgattttattgaagaacagttagctgatgacgctgataaattcatggttaaaggtcaattcacagatgcaaaggatatgtatcagtacttatttgaaaactgtgataatcgtgaagaattaaccagcttcctagaagactattttgacggaatggagatggctgactatggaagataaggatcttaaagactttcaagattggattaaaaaaatgcaagatgatgcagacgattgggtaatttatttagtctatcaatctaaaaagaatggcaaaacttactctggcgcaatgcgttggctgaataaaaataaaccagatttgccaggtaaatttactgctagcccaagtgaggttgtagcaaatgtggttcgatcaatttatgaagaagcagtaattaaggtccgtaatgaaggtttagataaagaggtagataacgatgattgatcaagattggttaaaagatagcattaagcaagaagcgaagttaaagtttgctgctagatgggaaaatgcagaatttaattcatccgaagcaagacaagcttttcaagcaattaaaaatactgatgagtgggaagcattcaagaaagtaatgatccaagcatatgaaaaagcaattactagcaatgtccttaatcagcttcagggcattaaaaatttgattcgcgatgcaggtgaagaataatgccagcatttagttggaaagaagaagtttggaagccaattaaacactttgaatcactttacgaagtttcaaattttggaaggattcgtagtctgactagaaaagttaagcatggcaattctcacataaccatctatggaaagatgatgaagcaagtacctaacgaaaaaggctatttaatggtcagactttctaaaaatggtaaaggaaaaatattcaaagttcacagattagttgctcaagcatttttaaataatcctcatggataccaagaaataaatcatttaaatgaaataagagatgataatcatgtttcaaatttagaatggtgttcacattctcacaacttaaattacggtcatagaactcaaaaatttattcaagctgttagtactcctattattcagttatcttcagacagccacagaattgcagcctattcaagtgcaaaccaagcttcaaaaattactggaattagtcaaggaaatatctccgctgtggtaagaggaaaaagaaattatgcaggtggatataaatggcaaaagttagaaaaagaggtatcaatgaatgcctgaaataaatattcaaacattggataagttgaaaaactggcgtgtgcttatttatggaaaacaaggaattggcaaaacatctactgctaaattcattccaggtaaaacttatgtattaggttttgataagtcctttaaagttttagcaggtcatttagctggggcatggcaaattgacgctaagaaaccaattgaagatctaaacaaatggttagagtcattcgatccaactaaatacgataatttagttttagatgatatttccaatttcgaaaaaatttggtttcaagaaaaaggccgagaatcaaaaaatggaattagcaatgaattacaacactattctcaatggactaattacttcttgagatttatcgaatggatttatgacatgccactaaacgtatatatcacagcatgggaaacagagcatccaataaccacagcttccggccagcaattcaatcaatatgggccggaactaagagattcagttcggaatgttttaatgggcctatccgatgtagtaggacgaatgattaagaaacctgatgatggaactcgcggtgtaattcttgatggcgatgaagggacatatgcaaaaaataggcttgaccagcgtagaggctgcaaagtcgaagatttatttaagtttcaaaaatcagatttagacaaagcagtagataaagttaaggagaaaaaataatgtttagtgaaaatgtaaataaaaagttgaagttagataaggaaatggaagacaaagtaagtgcaacgtgcatggatattcttaatggcagaatcaaacatttcattattgttggtttaagtgatgacggaaaccaagttcaaataaatcatggtcatggcattgtattatctggtctcgttagagatattcaacgagagattgatcaagaaaatgatcataccagaaatgccagtgattttatcaagatgatgcagaaaattaataagcaagatgattaaatgtttcaattatttgattatcagcaagatttagttgataaggctagaaatgctctagcagctggaaatcaaggcgttttaattgttagccctccaggatcaggtaagtcagtagtaatcagtgaaattgctaaattaacagtaaaaaaaggtggccatgtattattctttgtccatcgccaagaactagtaaagcagatcaaagattcttttaaacagcagggtgtcgatttaaaccattgcaccattctcacggtaggtaaagtagcaaatagattaaatattttagccaaaccagatttaatcattgttgatgaatcacaacactcaagagctaaaacatatcagaaaatatttaattattattctgatgttccaaggcttggttttaccggttcaccatggcgtttatctggtaaaggatttaaagatatttattccgcaatgattgaaggcccaacaactaaatggctgatcgaacatcacaaactagcaccatttactgtatatggctatcaactaggcgataaaaacttgcttaaaaaatccagtactggcgattataccagcaagtcgatggacgactttaccaaaagcattattcatggagatattgttaaatcttggcttaagttcgctaaagatcgtaaaacaataatttattgtcactcaacgagcttcagcaagattgtggcacaagaatttagaaacgctggaattaatgccctccatgcggacgctaaaacaccctctaacgagagaaataaaatcatggatagttttaagcaaggacaaataaaaatcctctgtaacgtagatcttgtgtctgagggctttaatgtgccggactgttcatgtgtcgttttactcagaccaacagagagccttgtagtttatttacagcaatcaatgagagccatgaggtatcaacctaacaaacacgcaatcattattgatcaagttggtaactttgaaaggtttggtttgcctgatactgattacaagtggactttggaagatcgtgagaaacatccacgcaaagatagcggtagtactgaaggattacagattaaaacatgtcctgattgttttgcagttattaaagcagaatgtgtgaaatgccctatctgcggtcatgatttttcaattgaaattagaaaaattaaacaaaagaaagatcaagaattaagagctattaaagcagaaaaattccatattgatctaatagcaaagaaaaaggttagtgaactaaccagttttaaagaattaaccatgtatgcaaaggcaaaacattataagaatggttgggcttggcacatggctaaaaggaaaggatttatttaattatgggttttattaatttaaacgaaaagacaaacaacagaagtgaactatttccaaagggaacttatgaaatgcaaattgtaagcgtccatggtgatgcaagccctagcggtcatgaaaatatgcaatttgattttctagttcgtaaagacttagacaaagtttctgcattagctaatactaatgcaaaaacacatggtcgccacttctttgcaaatgtttggactgctaaggataaagaaaccggtcaagattcaggctcatatgatccagcagatttggcaaatattgcagatgcaattggtttaactcaagctcaaattgataaatacatcaagtcaaaagaagatttgatgaaagcatgtgaaggaaaattcattagaatctacatttcagtaggtgagaatacttacaaaggtgaaactcgcaaacaaaatagtaccttcactaattcatggcaaaagactaagttcccaccacaagctgctaaaaagcaagaaactgtagaagatccatttaaaggtaatacaggttcaacagatgaattatccgaaaatgatattctattctaaggagtgaagtaaatgggaaaatttacctatgaaaacatccctcaagaattgcgaagtttaaagcaatggggattgtttcaacttaaatgggtaaaggagcggaataaaaataccaagattcctattgatccttataacggtagagctggtaaatctaatgatcctagtacatggtcagattttaatacagcactaaaagcattagatgaaattgaacgtgctgatggcttggcattctattttactaacggatatgtagggcttgatattgatcatatttcagatgatttagcagattggcatcaaggtgatagttctgttagcaatctgataaacaaattccgtttaatgactgatgaaacttatatggaagtcagccaatctggtacaggtattcactgtatttttaagggagagattccaggcaatcgcagacgtaaaggcaattatgagatgtaccaacaagggcgtttctttgcactaactgggaacagtattggtattcctaagattgtcactctttcaaaagaaaagatgcaagctctttataatttcttatttggtgctgataaatcagtgccggataagattgaagaacctgaaattacagcgctagatttatctattcctgacatcatccaacgtgcagaaaaatctaagactggtactcgctttaccatgttcatgaagggcggctgggaacaattctataattctcactctgaagcagatatggcatttgctaatgaccttgcattttggactggtagagacttccacaaaatggatacgatttttcgtaattccagtttaatgagagataaatatgatgaaaaacgtggtgctactacttatggaatatcccttttaaataaagcaatcagtgaagccgttaatatttataatcctgagcaagatgggaaagagccagatctagtctttaactggaacaaacctaaaaaacgggctgttgctcgttcatgggatgatacaggaagaggacttagattaaatgatcagttcggtgatgtattcagatatatggcagctgataaaacttggtatttctataatggctcatattgggaattagataatggacggcatattgagttagcagctgaaaaagttgttaatttgattaaaactgaaaatcctgatttcagctttgctactcagcaggataaagataaagcaatgaaagaatggaataagttcattaaagaatcacgttcccatatggcaaaaatacacatgattgaggagtttaagaagtacgtaactattgatcacggtgtatttgatcatgacaacatgcttctaaacactgaatctggttatgttgatttaactagcggtgaattgaaagatcatgatattaaaaagatgtttagtgaacaaaccgcatcagaatattcagacaatattgattgtcctatgtggaaagacttcctagaacaaattttcaatcatgatgagaaattgattcattatatccaaaaagctgttggctactcaattacaggatcgactgctgaacaagtatttttcttgctacttggtactggtagaaacggtaaatctgtatttatcaatactatcagaaatattcttggtagttatgcaaagcagatgtcagttgagtcaatcatcgtccacaattcaagcggaagtgctaatagtgatattgcacgacttgaaaatacacgtttagttaccagttctgaagctaatgaaggttcacgtttagatgaatcgttagttaagcaattaactggtggagatagaatcctagctagatttttatatggtcaagaatttgaatatgatcctaaattcaagatttggatggctactaaccacttgccattcattagaggaactgatgaaggtatttggagaagaattaaggttgttccattcaatgtacaaattccagctaacaaagttgataagaatttggaaaacaagttaaaagctgaatggactggaatcttaaattggatcgttcaaggcgcaatcatgtggcaagtagaaggcttgaaagaccctgaagttgttcaagatgcatccaagcaataccgtgaaagcatggatccacttgaagcatttcttgatgaatgctgtaaagctggtagcaattacactatcatgggtagacctttatacaatgcatatcgtgattgggctagagaatctaatgaacatttgatgtctatgactaaatttggtagagaaatggctaagaaattgcctaaaaccaaagaaagaaatggaactcgctatgtaggcatccaattaaagaaagaaccacttcattttgattggaattaatggctgtgattagttgcggttagttgtggttggttgtggtgagtatatgtggtagctcaaaccgttggggctgtaggggtgtgacgtgtttcggttagtgtggttagtttaaaagcctatattattatatttattttcttttttataatttactttttaaagaaaaaagtagtaacactaaccacaacactacaggctgtaggcgtaagacccaccacaaactcaccacaaactggtcacatttttagccaacccaccacgattagcagtctactatattgagtgctaagaaaaataggtgacaaattggcaaaagatgtcatatcggtatttacccattagcaatgctatacaaaaactcaccgctgatattttttgtgacggtatcagttaattcactacacttcatcagtgtggaagtcacttgagaggaaagaatatttaaatttgtgtaaatattgtgaaatcaacccaaagacaaagctaggacgcgactactacagagatgactatgttgatccagatgagattaataaggtgaatggtgaagacggaataatgtttacttacatcgattgtaaaaatcatccagctttaattatttctcatcctgatcctgagtgctattctcaggaaactgacaaaatctttataggtaattgtccctggtgtggacgcaatttaaagaaagaacatcaaaatgaacaatcataatttagctgaataccattgtgaacattgcggcagagaatttattattgctgaaattgatgatattaaacattgcccttattgcggagatatggacattgctagatatagtttgctaacgataactattgattaaaggagcatgaaaatgaaagatgaaaacggacgtgatattaaattgggtcttgaagaagctagacacataatggctacagattactgtgtaagatcagatcttgctctatgtggtgagttctttaatgaatatggtatgttgcctcaggagtacataaaggagtatggcaatgaaagtaattgataaaagaacgaagaaaactaatgaggattacaagtatggcgatattttaatgtgttgggataatgatccagatgaatataatctgtttagaatctcgactttttatgatagttattatgaacaagatcgttgtattgttgtaactatacacagtagtagtgacaatgaagcaaaaacttgggaaggattatttgactcacctaaagaagcggctagggacttaaagaatagttataaccacgctgaaaaagtgaatgcatacattgtgattactgattaacggaggaataattatgtgcgattactgtaataatgaaaaatcaattatttcaattgaagatacatacgaagatgggtacacaggtattgatagatatgaaaatggagatgtttatattaatggaaatgaattaaatttatcttgtgatgtcgaagttacttatgtatcaaagagtagcaagattaactattgtcctatgtgtgggagaaagctagaaagtgaaaattaaaaatgaatgcagtttcaaaaaaaagcatctgtccatattgtcattttgaaagtggatcagaggatccgatgaaaactttttatacagatggctgtgaattatttatcagaaaagataattcactagaagtggttcttattgattattatgatgacttttcctttaaacttgataaaaaaatcaaattttgttctatgtgtggtaggagattagataaatgattattagtttattttacagagtgaaactattttttaagcaattattttgtcatcacagttatgtatataaaacatcgctgtttagccttagcgactattatatttgtacaaaatgtgaacatgttacatataatcgaccaccgaaggaactaatgaaaagagttgaagacgaatgacatcagtttcaagtagctgctatctttgcagtacattaaatgcttttcacgatggaccggatttatatgcgccaaaaatgaatagatttcacgttaatctaaatgaaatggatgacaagtggtacttaacgattaaaggcttgccttatcctattaagtattgtcccaattgtgggcgaaaattggatgagaatgcaaaatatgaagtaactgattggttataaatgacagcaaaacaatatttcaatttaacattaattttaatgaactggttaatagtcttaatttctttttgttttaaaaatgaaaaattagatttacttatgtttatttggaccagtatatcgtttacatatttaatgcttagttaacaggagataataaacatgacaggaaaaacaattaaatttcaagcaacaacaaataatttcaaagttaatggtaataaagtagttttgcaattagatgcagacctgcttactcataagattaacttaaacaagttaaaagacattgcttttgatggcaatggagttcaagtaagtcttgaggctgatcaacaggaacttattcctgaagaaaacaaggataataagccaatgctagttagggatgacaagtaatgaaaactgcactgcttgtattatttgcaattctttaccctacgataagtgtactgaatttgttttcagattataaaaccatgaagtctaacaacgatcttatgaaagaaattcataaaagtaatgatttatttgattctttattggaagaagttcaagcaaataaaaaattaactgaagctgtgcaacataaagctactgcacaagataattttatgtgggaatcaattgtaattcttgcaaaaagaattcataacctggaggacaacaactatgttaaataataaaaaggctatttttcatgacaagaatggacgaaaaatttatccagattcattactttatgatgaagtcgctaatgagtacttttttccttatcgaaaaaatggtgtttggggtgatgactttttaggcgatttctacccacttaaagcatcacagttaatcttacagaaaaaacatgcaagtatggatgacatgaaattactgatgaaattgcctaatgaatcagacgcaattttcaacacggaagggtttatcaatggaaagtgaacatagtatacaaaagaaaattgaattagttgtctcacaacatcattgtcatatattccgtgctaatgtcggtaaaattagaacgcctgatggtagattttttactacaggcttgccgtctggctatcctgacttgcatggctggcgtgattgggatcatcaagctttttacattgaagtgaaaaatgctactggtaaaccgcgtcctgatcaaatagctttccataaaatgctaatgaaattcaatgttattcatggaattgcacgaaatactaatgatgcattaaagattgtagagaatggtttagttggctacggatatgaatagaagaggtgattgtatggaagtaacaattgacgcagatacttatgaagaattaaaagattatgccgatagactgaatgaatcaatgccaatgattgcaactaaagcaattaagcggtatatcgatagctattagttatgaagtataatagacatattacgaattgctatatatctattatatggagttggttattttgaatttatttgctgaagtaaattattctgctactgctaacaatgttgatcgatttctatctaaacaattgcctagattattacgaagatgcggacatgatttaatagatttatcaagtcctaaactatcatgggcaccaagtcatagtacgggtcacaactatgctgaaacatctatagttagtgctttatctattgaacaagtaataaaagctatatataaaagtatctatagttgttcagaattacataagacagtattaatagataactatgtttattgctatgatcaagaacaaattattaggatgttgccttatgaaaagtcacagtactataaccgtatcaagcctgattcactgcttgaatttgctgatgcatatgactactatcaacagcaatgtgatgtggatgatgataatcttgttgatcttcgtgtgtatgcatgaatcggactttcgtcggaaactgtgcggactttcatcggagatcgatcggtggaaattagtgcataattgatattgtcgaaaagtgaatgaaattcgacaaacaatcttagatttttcttcgcatggtcacggttcaaatccgtgactatgtttaggaacagccgtgtttattaactgtcataattcaattgatgctgttccatagcatgcgatgacctataatcaaacattaccgcatattatttatgaatacatagcgagcgtgcaaacatgagtcgacttaggtcggctttttgttttgccaaaaggggtgagttgatgccacgaattagacgttgccgttttcccggctgtcatgctgttgcttatgtgccgaatcattattgcaaaaagcatattgagcatgaagcagaactgcaaaaacgtaataatttttatcgattccatagatataacaattcaacgagacaaaggtattacaacaaagtagttcgcaatcgcaatccaattaaagcagagcagaataggttttatcattctaagcaatggaaagacatgcgacttatagttcttaaacgtgactatagtctatgccggtactgtaaggctttaggcattgttaaggaaggtaacgtaattgaccacgtactgccagtggaaaggttcccagatcacatgaaagacttacaaaatcttgttacatgctgtcaggaatgccactactggaaaactcgctttgaagagcaatactatggcacgggtttgcatggtaagccaacagataatccgccaataacggacgtaaaattgattgctaacttggcggctagattgaaaaatgatcacgctgtaaatggctaaaaattcgcttctaagagatttaaattttgtaagtgtaattatacatgaatcaaaaataaaaagacccccgccccgttttttaacgtctagggagccgcatcagtgccgttcgcttgtgccacaaacaaaattttgaaagcttttgaaagggggctgaaacatgaacaaagttgatctatcaaagccaaaagtacctaatcaagcacctaaatggcttggaacttacggcaaatacctgtatccaaagcttgccacttatctaaataagaatgacaaaatcttacgagctgatgaatatttacttcaacaatactgttcagcctacgacacctaccgcatggcttatgacgatattcaagaacatggtattcagcaacctatctataaaaccgtcatctctcctgtggatgggaaggtggcagctaagaactttcaaggatacaagaaaaatccagcttatcagattatgtctgattcgctaaagcagatgaacacgataggtaaagaactgggcttaagcccaaaagccagaagtcagatgatggaactgaatacacctaaaaatgatgatgctaaatcaactgttacaagtttaaaggagtttttcgcatgatttacgttaagcacggtcatggaaaatgggtaagaaaggatttagatgttttgaatccaattaatcagattagagaagtagctaattatataaaaagacggcattctaaaattataaaaaagctatttgctagttaaatgcagtaaaaatttgcatcattattaacaaaatggctgttttgttaataattaataggctaaatcacaaaaatctgtgatttagctttttattttactcaaaggaagtggtttaagaagtgaaaattgatctaactcaaactcatgatgtggaaggtgcttatcaatcaattgattggaatgacatcagacttaaatataatgacgatgccattaaatactgttttgacgttttggatggtaagcaaattgcaggttatattactaagcttgcttgttttagaaatcttcaagatttaaagcgtcaaggtcaacctgattttccatatcattacgatatgaaggaagttagaaatactcttaaatttgcgtcaattgttccagatgttgaccttcataaaccactaccattaatgaattggcaaaagtttattcttgctatgattaacggttggaaagacgaaaatgatgaaaaaagatttactgatattcatatttcagtaggacgtggtcaaggcaagacacaaatagctggtattcagatgtgtaaagctgttttgattgatactttgaattacaccaacaaagactttttagttactgctaatacatctgatcagtctacaaagctgtttggttatatcaagaaaatgcttgaagcagtaattaagattgaaccttttgcatccctcgcaaaagaatcaggtcttgatttacaaactaaccaaatcattgaaaagagaactaacaataaggtatggaaaatcagttatgaagctgataaatatgattcaactcacaacgttttggctatttatgatgaaactggtgcgttgaatacatatgacagaattacagatattacagatggtcaagcacaagtaattccataccatcaatttatcaagatcagttcggcttatcctgatcctaccagtccatttcatcaggaacaaattacattacagcatgttatggaaaaagattatgaccgtgaaggtgataactctctctgtctggtgtgggcgcaagataaccttgatgaaactttcaagcctgaaacatgggaaaaatcaaatccgcttattggtttatctcattcagaacgtaagcgtagaactgaaaatctgattaaacaacgtgatcaagggatgcttaccaacacgctccacaaatttcagaacaagaacttaaatctgtggttgaaacagtcaaccgcaagctacttaaatcttaaagatgttgaaaacgctgttgatgatagttttgagattgacggcttaagagtctacatgggcttggactactcaatgttttcagataatacagctgttggcttcgcatttccttatactactgctgatggtgttcacaaatggcatatgatgcagcattcatttattccatggcaagctgcagggagtattgaagcaaaagaaaaacaagatggtcttccttatcgtgaacttgaaaagaaagggtactgcaccatcactagccatgaaaaaggcatcatcaatcctgaacaagtctacaattggatacttgattttgttcaaaaacataggctagaagtcgtatttttcggttatgaccgttttggcagctatcaggttaagaacatcacagaaagtttaaatgccaatacagggtggttaattcaagacatagcgcaacgcacaagtgagttagctaacccaactaagttcttacaagaatcttatgcaactggcaaaattacacggtttgatgatccaattgaagaaatggctttgcttaatgcagtaatcaaagaagataaaattggtattcaagttgataaggataaagctaccaagaaaattgatgttgtggacgccgaaatagatgccatgtatcaggctatgtacaattttgaaaattatggcttgattaatgataagtcacatgaagttgaaagaatgacacaagagcaggtgctaaagtggtttgaaaatcctgattctggtctattaggaggtgaaacgggtgataattaaaacactgtttaaagatatttggaaattcttagatgtaatcctttatttattgggctttggctttattgttatagctctttttttatggaataaaatagcaggcttcgcaggtctaggaattgctttacttttgacgggcttattaattgatctacttccacatggacagggagggggtgattaataatgcctgtttttaatttaaacaaaagtaatgtaactggttatagcttaaatgatcctgaatttattactttgtttaaaaatgatttatccgctagcaattatgtttctgcagatacagctttaaaaaattcagatatattttcacttatttcacaattatcagctgatttagctttggttaaactcaatgctaacaaggatagagtgcaaaacttaattgataatccttctaatttgactaatgggtttagtttctggcaaggaatgtttgcacagttactgctagacggaaatgcttatgcctacaggtggagaaatattaatggcgttgatttatattgggagtttttaagaccgtctcaggtccaaacattgcttttagaagatggctcagggctaacatataacatcaattttgatgagcctgatattcagccaaaagagaatgtaccgcaaagcgatgttattcatatcaggcttgtatccaaaaacggtggtaagactggtgtttctccgcttactgggttagctaatgaattgaatatcaagaatgcaagtaatcgtttaacattacatgctctctctcaatctgtggaagcacctgggattttaagtattcaaggcggtggtttacttgattggaagaaaaaatcagctagatcacgtgagtttatgcgtcaggttaatagttctgataatggaccaattgtcttagatgatttggaaacttaccagccacttgaagtaaaaagtgatgtagctaagttactttcacaagcagattggactggtaagcaaattgcaaaggtctatggcgtgcctgattcttaccttaatggtcaaggcgaccagcaaagtaatattactcaaattggtgggcaatatgctaaagctcttaatcgctatgctggtgcggttcaaggtgaattgtctaataaattaaatagtcaaattacttatgacattagaccagctattgatgcaactggtgataactttgcatctgaaattggtgatttatcaagcaagggtattttgtcaggcaatcaaggacggtatgttttgcaacattatggttatttacctgatgatttgccaactcccgataaaccaataattccagcaaatgaaggaggtgaagacgatgacaacagtaccggtcaagggaataatcgtacccaataatttaggtgatatttattcatttctaggatatgaagtgactagccctaatcaattaaatgaggctttgagcaatgctaatggtcaagatattacattagagattaattcacctggtggctacattgatgcaggctcagaaatgtataccgctttaaagaagtacccaggtaatgtaacagctcaagtagttggtcaagcttgttctgctgcttcatggattgcactagcggctgacaaagttgaaatgtcgccaactgctcaaatgatgattcatagagttagcggtggtgttgaaggcaatgtggatgattttgctagtgcaatgcaatcgctagattctatggatcaagcttatgttgatctttatagcaagcgaacaggtttagataagcaagaagtttaccgtatgatgtgtgaaactacttggatgaatgctaaacaagcagtagataaaggctttgctgattctattatgtttgagaatgatcaagcaccagcggttgtgaatgcttacggagtacccgttttaagtgacaatgcaattcgtaagattaaagcattaattcatgataaaaagtccaatgctgactctaaacccattgaaaataaacaagaagatacagataaggggcaagtcaaaaaagacttgtctcttttattgtggcaatagaaagaagagaacacatgaatttacaagaattacaaaatgcctggattgaagcaggcaataaagttactgatctctttaataagaaggtagctttgcaaaagaactatgaagcagatcccgaatccgtttctgctgaagatatgaaaaaggcagctgaagcttataacaaagcggttcaagctcgtaattttgctaaacaaaattatgatgatgctgtagaagctcaaaaggttaataaaccagcatcaaagcctattgaaaataagactgaagataaatcaaaggatgttatttctggtttcaaggatatgcttaaacatccaatgaagtatatggaaaacttatcatcaagttcaacttcagatggtaacgctggtttgactatcccagacgaccaacaaactcaaattaatactttgatgcgtcaatatgatgacttacgtgatttggtaactattgaaaacgttggtactgatcatggaactagaaatattgaaccattttcaaatattaccccaatggatcaattggatgatattcctgatgattcaactaataactcaacttacgcatggcaagataaagatattaaggaaggcgactatagttctgttaagcaacttagttacaacatccacgactacggtgatgtattctttgcgcctaatgatttaatcaatgattcaaatgcaaatattgaatcatggttaaaccaacatattgcacgtaagaatgttgttacctataattcaaagatcattggcttacttcctaaatcacaaaagaaggctactattactaagctcgatgatattattgatgctttaggtcaattagatatggctttatggggtggcgctactttattaactaataaatctggtttcttagcattagctaaagtgcgtatgtcagatggtacacgtgcaatgagtgtagacccacgtactcaacaaaccactttcaatatggacggcatgcaatatgtaaatgttcgtgtcgttgaagatacttggttacctaacaacactaatgctagtggtaagtaccaaagccaccccttctactttggtaactttaaggaatttattcatttatacgatcgtcaacaaatgtcattgcttacttctaacattgctgataaggcatttagacgtaatcaaactgctattcgtgcattgcttagatttgataccaagatttgggatgatgaagcaattgtatctggttcatttgacaaggttgagagtcaaccaatgcttatgcaatcagttcaagttccatctgataacggtggcactcaagctggatctgctaatcactaatagaaattaggtgatcaatgatgaccacttacttaacagttgatgatgggcttaaacgctcacttggttacttacctgacgatgatgcgcttgattctagtgatgaagaacgtatgaaaacggcattgaaaggtgctgaaaattatgttcaaggcgcaattggtgaagatgctgatgaaagtttttacaaaactgaatcagtatttgaactgtataagttagcagttaatgcaattgcggctaattggtttttgcatcctacatctgctgtatcaagtacaacggctaagcagattataggccaactccgtggggcctatgatgaaacaaaggtggtgaatgacgatggtacaactacagacatgggaccgactgagtaataggatcacttttggtactgtagaagatagtgaagatgataatggacttcctactaatgaatttaaagcattaactagccctactttatgtggtcgatggggcttaactactactcaaatgattcaaaatcaaggacatcatcacgatgaatcttttattgtcgttattcaccatcgcagaaattatgatggtattactcatgctcaatacaatgggaaattgtatgaagtgagtgacatcaatcttgatccatttcaaaatccaactgcaggcgatctcataactctcacaaaagtgacagaccgtgatggttgatttagataaaggcctaaatgattggctagataagatcactaaaaaagttgatctatctactagtcaaaaatcagctatcactggtgaaggggctaagacttacgctgaagtgcttaaaaagaacactccaatgtctcatacaagctatgcacatgcacggtcagctggtcatggccgtaagtctaaacacatgcgtgacgctataacttataaagcaggttatgaagtcaacgatggtaatactggtgatacttcagtaggctgggaagataaatataatgcaatggtcgctcgttttgtaaatgatgggacacgtgatatgtctcaaaaagaaatatccaaccttcattttaaagatcatgcagaaaaggaagctgcagaagcagtactaaaagctaatgctgaaaaattcagagagattttagataaatgagtactgtagcaaaacaggtagtagatttgctaaacagctctaatcttcctaaattgcataaagcctacagttttgcagttggtactagtgagcgtactccacgtgattctgtggatatacttgttagtgaagtgaattttgattttacagaatcaggtagtaaccaatacacggaacagatacaacgtttagcgataaacgttttttatagtaaaaacacaaaagtaaacatgaacgaatttgaacactcgctcatgtcttttttcgtagctaatggttggcaaatcgtagctagttttacagggcacacatatgaccctaattctggtgagccaacaattagctttcaaattaaaaggagagaaaaatggaacttcaaggtttaaatgatttacttgttttcaaatatgacaaggacggtaagttagttaccgatgaatccaaaggtggtttgaccactaatattggtaaagatggtgtatttaagattgatttggaatcatctaaaggtgctactcaagctaacatcactggtttaagtcgtactgcacaagctgtctatggttctaacgcaaaagctgaacaacactttggtgcatatcaaattactggtacttttggtgctaacgacattccgcacaatttctatgatgcaattgtaggtcttgaaaaggacagcaagttaggctttgggaacatggctaaggactcaaccccattggcatatggtggtgttattgctcactcatataactcaaacattggcgttgatctttactttgcgttgccatatggcaatttgaaacctggcggtgatttaactatgggtactgataatgaaaacccaactttggtacacgataccttcactttaaatgccgctgcacgtccatcagatggtttggtttacgaaaaattctattcagatgaagatggattcgacttcgacaagatgcttaattggattatttcaggtactgtaactggttcaactgctgatgatccaactcacaagggacctgatgatgctactcataaggacactattccttcatcatcaactactcactaataattagcagggtgggtagtggtggcaaattaatataaataattttgttaagaacggtgtgaaagccgttctttttctttttttgaaaggaaaatcaatcaatgttagtaaaaatcaatggtaaaaagcttcatttaactacttttgaagttgaagcaactgtaaaaaacgtacgtgcatgtttaaaggcacaaaagttttttgcaaaattatcaattgcaattaataaggttaaagacgatgatgaccaatcaattcttgatgttttaacagcacaagaaaatcttttggatgaagaagaaaagtttttgaagaagattttgcatttatcagatgcacaagtagataagattgaagattctgctccagaagatgtaagtgaatttgttactgatttaattggaaaaatcttacaagtagacgactccaaaagcgacaacgattaatgatcctgatccagtacatgcctatgaggaaatgctggaagattttgattatcaagaacaacaaatgattgttaatgctcatatgtccctagaagattatgaaaacactgattattaccgtcttgtggaagtaatgagtgcaagaccaaaggacaaacgtccaatgagtctttgggactttgcagcaagtttagacaaaacagaaaggaggtaaataaatggcaggaagaataccagttggtgcactgattacagatattaaattaaacggtgatcagcctgtaaaaacgttacgagaattaaggcaagctgtatctagtactaccagtgcatggaaagctcaagaagctgttttaagaagtgctggtaagactactgaagcggctgaagctaagtacaaaggcttatctgatgctgtaaaaagtcagcgtagattaattgatggcttagttgaaaagcaaaaatctttaaagaaacagcaagaagaaattgatacttctacagataagggcaaaaaagcttatgaaagtatcagtactgcacttcaaaagaatgctactcaaactttgaaagctactagtagattagaatcactgactaagcaacaggataaggctaaaaactctctcacttactacaagtcaggattagcagaagctcaaaagactttaaaaaccactacggctgtttcaaaatcgtatgttgatcgtttggaatctgaaggcaatcattataaagctaatgaagctagaatttctggttatagaagttcaatcaataatttaactaagcaatatgaaattcaatctcgtgaattaaaacgtattgctagtgaagctggtgctaccagtgaagcttacaaacgtcaacagatcagagttaatgaaacagctacttcattaaacaaagctagattagctgttagtggtcttgaagaagaacaaagaaaaatcaatcctacaccatgggatagattaaaagctaaaatttctagtgttaacaaaaaaagtcaagaaactcatagaacattgcgtgaagtgtttatgggatctgcacttggtaatgctgtaagcaatgctgtatctaatttaggatcaagccttaaatctgcttatacagagggcatgaacttgaatttagccattgctaagatcaatggtagattcaaaggcatgggcatgaacactagacagattcaagccctggataagcaaattggtgagttaaagtctaacactaatttagctggtgattcagcatccgatttacaggctcacatgcttaactggtcaaccattggctttaaaggcgctatgcaaatgtctaaagccttagctggtgtaggtgatagctctaaaatgactggtcaacagattgaccaaatgtcagcagggcttcaaagaattggctctactggcaaagttacttattcctccttaagtagaattaccaaagctgcacctacttttatggctacacttgcacgtggtgctggcatgtcagagggcaaacttagagcattgcttaaaactggtgatgtaacacaaaaacaattccaaacttggattgctaagtcatctaaatatgctgatgaaagttttaaaggctatggtcaaagtcaagctggtgctttaaaggctatgactgtagcacgtcaaaagttggaacaagaatttactaagccaatttttgatgctaagacttcaggacttcaagctttaaagaacatcatgaccagtaaagaagtcatgagcggtgctaaccaactaggtaaagcgatttcaaacgttattggctacttagataaaaataaaggtgatattgtagctatcactaaaaatgttgtttctctaggtgtggaagttggtaaggctgtttggaaagactttgcagctattatccaaaatattggtaaaggtaatggtaaagattcaagtagtgcattacatacgcttgctactgctactgctgatttagctaaaaataagactgctgttaagactatatctgatgccataattgcaatggtagcaattaagggcattggtaaagtcagtggcggtcttttttctattggtaaaggtgctgttactgcttacaagtcagttaaagcattaagatcaggatttaaaggtattgagcttgctgaaaaagctactaaaggtgaaaaagcttgggctaagtttggtggcgttctatccaagacttttagccgctttagaaaagttggaagtaaaacttggactactgtagaaaaagctggcatcaaagcttggacaggtattgaaaaaggctgggttaaagcaagcgatttaggtacaaaagctggaaaagcaatagctaagggttttagagctacaggaaatgttttagcaaaggcaggcaaatggagctggagcaaaattaagtctggctttaattttgcaaaaaagtttggtcaagaagtaggcaaaaagatttcagcaggaattaaagctactactaagttctctatgggtaagcgtcttgctactggtgctttagcaggcgctgcagttgcaacacctgaagtgataaatgctgttaaggaccgtcacagtgctaatgctagaagtcaagacattggcggtgctgttggcgctgtcgctggtggtacattaaccagcatgattccagttgttggtccaatgcttgctccaattggtgcaattatcggtaaatatgctggacgttggggtggtcaagctgtcaataatttcaccaaaggttggcagcgcaataaaccgcctaagaaattctggagtttagaaaatttaggctggtcaacccatgatacttttagaaaagtaggtaagtggggagcagatgttggtaagaagtttggtcaaggattaagaaaaggtaagtcatttgctaagaaaaactctaaagaattagcattgaccgcagtttcacctttgttaggcattccagcactgctttacaagaataatcctaagttcagaaagtgggctaatggtgttggtaaaaacatcaagagtggtttaagtaaagttggtaaagcagttaaccacttcaagagttcattatccaagaactttaagaaagcttgggataatgtctataaacatagttctaaaggtactaagcagattatgcggtctgtttctcgttttgctaaatcttacataaagactaatagcaaagccaataaagaaacgattaaaaactttgcttcatttagcaaacgtttaaagaaaaatcacggtgatttgtttaagaccgttggtcaaactgctaaaaaacaacttgctattgagaaacgaagatggtcagctaactggaagaatatttcaagaactgctaaaggaatttggaatggtattcataagaatgcttctgatttatataggaaactcaattccgccacacatggtggactaggcaaagtttttagtggttttaagagtttcggcaattctcttaaaaacttctggtcgagtttattaaaaggcattcaaagtacttttagtcatgctattgataacatcaaaggtgctgccaataacgtcaataagttcttccacggaaaacttaaggttggatcacttcatttagctagtggtactgattggaagaagaaatatggctatccagctatcttaaatgatggtcatgattcaccagctactaataataaggaaggaattttaaatcctgatggttctgtggaagttcaacagggtgtgaatgtaccacgttggatctttccatggcaagacgttattaatgctcgtgatatggctaagttgtttggtcgatcagttcaccttgcaaatggtactgttgatctttatagccttgaaactaagaatcctgttaagattcttactacattaactaagcttactaagaagaagtacgatgaagaccgtttgcgtcatcaaaagcaaaaagaacgtcatgataaaaatgatagtgctactgctaatgagcgtaagcgtctgattaagcatgaacaatatgataaggctgatagagctaaagtcgctaaagaaattagagacgctctaaagcgtggtagaaataccaaaggcttaattgcacagctaaataagcttactagtcgtatcagtcaagaacgtaaagctgttgctaagaccaatcctcatcacggtgaaacgcttgtggatgaaggattgttacttggtgctaatagtcgaattggcaagtccaagtggatcagtgacgctttatttaagaaacttactactgctcctaaaacaaagaagactaaaaaacgtaagaccaagaaacgtaaatcaactagaagaagatcaacgtccatatcaagacgttcatattcatctggttcaagtcgtgtttctgtgccaagtatcagcgcttctggtgcatcacttaaaggtttaagcagtaaatctatatctgtaactgctaaggtaaaaggatctaagcagatcaaagcccttgaaaaggctatgaagcgtattaagggtggcactcataaggttactgtaaaaaccaagggtgttaaatctgttaagtcactctctaaggcaatcaagaagatcaaaggcaaaaagagtactgttagtgtaaaaacaaaaggtactagccaattaaagtcattacacaaaaacattaatactgttgaaaaacgtcttaatgttttagctaggactgctaaaaaagataagtttggcgaacaaatttctaggcaggctgaaaaggctgttaagtcactcgaaggcaaaggtaatttcaccaagaaaatctctagcatgtctaaagcgactgttaaagatttcaagtcaatgacttcaagtgttggtaaaactactgataagatcagaaaatcaactgaacaagactttagtaatctttataaacggtcttaccaatctgttaagagattgcacgatggtgtaatcaaattaggcactgctactgctcgtggttttggcggtgcaatgcataaaatggttggttatgcatctgattcaatgcgtggcacaatcagacaaatcaaccgtggtattcgtggtattgatgctgtattaaagcaatttggtggtaatagttctgttattaatccagtccactttgctaagggtactgatgcaaatggtcgtttaactcatgacactttagcagtcgttaatgatgctcaatctggtccacgtcaagaagctgtagtaactgatcaaaatgacattattattcctcatgggaataatcgtaggatgctattgagaaaaggttggggtgttcttaatggtactcaaactcaatcactctcacttccacactttgcaaatggtactggcattagcaagaaagaacttagaaagttagcagaaaacagcttaaagcactttgctgatagctttaaatcaatgtttaccaataatcttgatgatgttggttctaatttaactaaagattctactgatttgagtaaacgttctggtacttactttggtaatccatggtctcaagccatgtggacggttatcaataaagccattggctctggtggtggttcacgtgctaagttcttgcaatatgccaaggatacttttgaccgtgttaagtatcaaatgggtgctgcgtcaaggaccttatctgactgttcaggtatggtaatgcaggcacttagacattttggaattaacattggtcgtactactgttgctatgcaggaatcatcaggtgttcagtatttaggtaaaaacttatctaaaacagagcctggtgatttggtcatttttggtcatggtactggtgcagctggtcacgttggtattatcaacaatccaagcaaaggcacaatgtttaatgaaaccccaccttatgcacgtatcagtagaatttctgatgcaatgtctatgggctatggttactaccgtgttaaaggtcttcacgatcaagctaagcatcaacctaagattaaacctagtttgttagctttagctaaacgtgaacttggtggtgaagctcttaattggattggtgatcacttgtcagaaaatgaagatggtataggtggaaagcctacaggtgatcacttacactggttaaaacaagccggcattcctgaatcttggtggcattatatggaattgattattgatggtggaaatggaatcccaggtgaatctcactggaatcctagaattactaacccatcaagtggcgcttatggtattccacaatcattaccagcaagcaaaatggcatctgctggtagagattggagaactaatgctattactcaattgagatggatgaaagactatatccgtggacgttatggtactgctaaagctgcatgggaacacaaggttaatacttctactcactggtatgctaatgggggtattgcaagttcgccaagtatttttggtgaagcaggacctgaaatggctgttccgcttattccaagtaagtcaactcgtgcttgggagttaattggcaaggctgtaggtattcttacagctaacagtaatttaaatgctaaccaacaacgtatttctaataaagatgaaaaagatgagcatgacttattaaaagccatgcttttagttttgcaaaaaatgagcgctcaaaaccgtgatattcatatcacacttgaaactcctgaaggtcgcaagctgtgggagttagttgagccgttctacaagcaagaccgtagacaagacatgattaaagaaagaaggggattaagtgcaagatttagatgataatgtgaagctgatttttcaagaccatgcttcaacagattttggcatggtcgtacaaaagccatgggatttaattcatccaacagctgacattgatcctacacatataaaaggtaaaaatggtgatttcttacaaaataatcaatcttaccaaaatgtgactgaaacctttaatcttgaaattcttagaccacctgaacgtggttggtttgattgggaacggtctgtaactgattggctctctgctccaactgatcctgatgggcggatgaaatatcaatatcttaaattcactgctgatccaacatatgtgtttaaggctattgttaaagatccattcactgttactaaagatgtaactagtgattttgttggtgtatgtgcaataccgttttattgtcagcctttccaatatcgtattgatggaattgcttatatcccattgcctgatagcgatgtggtagttggtgaagaaaaatggtctgctattcctgattggcacttcattgcaaatggtagtttcactttgtacgtcaatggcttgccttacacgtttgagaatatggaaggtgaattttggcttaatggtgctactggtgatacttatgatgcagatggcaatctatacaatacacaaactcattttcctaaccttgatactcctaaattgtggaagggtcagaatactatcactgttactgctgaaactggcactactatcactaaagctgaatacaaaccaaattggaggaggttgatctaatgaaattaactgtaggtacaattcctgaagttgattatggtgactactctgatttgatgacaatgccacatctttatgacagtattgccagtgattttactagtagcggtattcctcttcctgatgcaattgattgtcaggttaatggcaattctaatcagttttggtctttaactatgacttatccaagatcaggattgcaccaaaaggaaatccaacctaacaaatggattatggaagactgtgatcctaagcacgtacatcaatggtttaaaatcatccacattactcccgaattagataatgtggtggttgaagcggaacacattagtgcgttacttgctaactctactgttgctgatgatattcaattaaacggcgcaactgcacaagatttaggcaatcaaatccttaatcaaatgcaggagcagagagaatttactttctattccgatgttaacaaagtaagtaaagtgaatattcaaggcggccagcaggcaagtaatttgtttattgatcctgatcaggaaggtgatactgttactcaatcagttttaggactgtttggcggtgaatttgattttgataattggaatatcagacattcaaaacgtattggacgtgattctggtattaaagttacctatggtaaaaatatcaaaaccacctttagtcaagataagaacattcagaacatgtatactggtgcggtatttgtcgctaagtatgtaccaggtcaagcaattgcgaaaaataattggcaaggctgggctacatgggaaagcacttacgattcattaggtatcacttacatggctggcggcaatatcaatatctatgattgtcctgtagatggtcaaaagatcattggtactttgcaaaacgggatgaaactgcacttaggtcagattgttaatgatggttcatttactcctgatggtaaatatcaaattaacactgttaatagcgatagctggtatccaattgcacaaagtgatggcggtggctggattgattctaagtggatcaattttgacacatcaggtgcttatgcaattaacaatgtcagtgggacggtaactgttaagagcagtaatccgtttgatagtgaaggtgtaggttctcgtgttactgttcatggctctgctgtagttgcttacggcaaaggaaaatcaattagagtattttattcacctgaaattggtcctgatcaccatcctgttaagtcactaggtcaagactggactgttaaaaatggtactgttgttgactatgacatggttgaacgtaattcaaacggtgatttatggtacagaataggaccacaccaatggctgtatggaccacacttatcacttactgaagaagacagctaccgtcaatacagcaactctggttatggttatgttaaagatggcgctgtaaagtatcactttactaaggaccataaaatggtgtctagcaatactactgttattaaaaaaggtagtggcaaacatgcatggcactgggctggtaaaggcaagaaacgccataaagtttacggacatgctaattactgggccgaaaagcaaaagaaagtcaaagttactgctaaaaaagggatgtctactattgataaaacaattactcaaggcggtaagacctacatgcacacgagtcatggctgggtagaatctagttcaattaactacactaaagatggttcagttaaaccacattcctttgatgactttattaataatcaacttaaagatcattccaaggttgaaatttatgcaactcctgacagtaagaatgctttaaactggtcaattcctaatggtgagacattcactgttgttaatggtcatgaagcaaaatctggtgatggcaagacttacattgaagtaacttacaaaggaaaaaatggatggctctgtgaagatgatattgatgacaaaaattcaaatattacatctgcagatgctgatacagataattccgctgatactgacaccaactacaacgcaaatgttgatcaatctaataaggaagtaactgttaagattggtccactttatgctgaaggatttggtgtaaatcctaacattgatagcgttaatactgttgatattagtggttacttcaaacatgatgatcaggatttaagcggtcagcaaagtgatggtagttttgttgctacacaagctgatattgatcaagctactgaaattggtaagaactatctaattgaacacagatatggtcatatgcaagttcaaacatcacttgattatcaagacatgtcagataatgatcaggactttactcaactaagtctttatgactatgtggatgttagttttcctgattatgaaattactgaaaaagctgaagttacagctacaacgtgggactgtttagcccacgtttttttaaatgtaactttaggtgatttgccaactagctatgaacacctacttgttcaagctagtgaagatagaactaatgaaaaaatcacttccacacgtcaagccattgccagatcaaatagttttattggtgctgttcaggaagctatgactttgcaaggtacatcccaaactcaagcatgggagaccttaatggcaaagttaggtaatgctcactataaaactgataaagctggcaagaagaccttagtacttgatgaatcagttaaagattttgctaaccacatgcaggaaatggttactaacatagataactttgataattttctgaagtctggtggtggcggaatgcttgaacctatttccagtgatggctctaccagttggaataacgtcatggcaattagagctaaaaacaatgatggttcttatatggaatttaatggcttaggttttaatttccatgatatttatggcaatccacatgctttgtttggtattgatgattcaagtggtgaagtaactggcaatttctttgttgatcaagctcatatccctattttggatgcatcacacattaagactgatacaattacaagtttgggaactattaacggtgttttacacgttgaaaaccatggcatttcaattgcggttggagatgccactaatttactaaatcctagtcaggaaattggtggtttgagtttagattctccaaattatactttgaatttgggatctggatcagtaaatattcatgataaaaatagtggtgctattacacacattggacctaatcaagcacagattggtggtaggaatgttgttgtaacaagcagtgatcaacctgtattaggttcatggattaagcaatattggcgaggaccaagtaagtattgggatttataaaaatgaatacattagaacaatttgtagcaaatgaattgggaactgttattgcaaaccaatccattaaaatagcgaaactagaaaaagaaaatcaaagtttaaggttaagaaatactcaacttcaagaaattcacagaaagaaggtgaaagagagtgagtctaagaccgataacattaaaaacggataaatcaataacccccgtgtcagacgacacgagggttttacgttctactgaaaaaggtttagtgctggacgtaacaattttaaatgaagatgattctccctatgatttaactgataaggatgtttcattttcagaaattaaagagagtgatcgtgtagttgctgatgatggtactggtgagcaaagtggtaaattcaacatgattgatcgaactaaaggacactttagttatcaaatgactcaccaatgttatacagccagtggcacttgtttctttcaaattaagcaaggcgacactattgttgatactacacaagatttctattttcaagttaaagttgatccaactgttaagcctatcaatgatagttatgtaagtagtcttattgctatggaaaaccacctgctaggtgctactcaaaaaacacaagctactattgatcaattgaataaagattcaagtaatgcacaacaacaagcacaagcagtacttactaagattaacagtgattttactgattactctattaaatacaataagctggcaagtgattgggctagtcaagaacaagctattcaaagtaaagctgatgcacaattagctgatcttaaaaccagtaatcaggctgatattacagcggctattaagtcaatcaatgatcaacgtgatgcagctcttgaagagttgagtcaggaaaagacaaaagaattagctgacattcagtcagattacaactcgtggaagacttccacagttaaggatttcaatgatactgttcaaccaattaaggatagtattagtgctaacgatcaaaaacttaccactgtaagtaaacaagttgatgatgctgtagcatcaatggactccttgaaacaacaatttgataaggtagacttttcaaagtttgttacaggggacaccattaaaaattactacactaaggaagaaactgacttaagacttgcgcaagctggtaaagttaaaacagttgataacattcaacctgatagttcaggcaatattaatactgatcactttactaagtctgaaacaacacaaaagctagccactaagctgtcgtttgtcaagtgcgacagtcctcaagcggcttatgatgctagtttgaaaccagcagatgatggatcactggtaattggcatttatgatcctgatgatggaccaaccagtgctgtaattggtgataagacaatcactattagtagcttgtatgaatcactacagaacttgcaaactcaagtgagtggcttaagtggtttgcaaagcgctgtggacggtaaagccgataaagcaacggtatttttaaagactgatgcagacagcttaaagaatcagcttgaatctgaaattagcaacgctggtaagcttaaaactatcactgtaaacggtggcgcaaagataagccctgatgatagtggcaatgctaatatcactgttgatttatcaagcaaggttaaccaaacggatctgaataacactaacaacagagttacagcaattgaaacaggatatatgaaaaagcctaccgtaattagtaaagctgactacgataagcttgctactaaagatccaaatacgttgtatgaaataacagaataaagaaggtgaccgtatggctttaacgataaatggcaaaaaagttctaggttatgctctaggtgaaaatgagtttcttaatggaaatggagcagaaaacctaaatattttttgtattggtggtgataataacagtgaatggaaccatcaatcttttactattgatatgacaaaatattttagtcaagctgatgcaaagtattcggatgttcaatattaccaaattattgtaaaggtattttatcaagatgctgacaataatgctcttgaaaacgattttcacacaccgttattgaaacgcggtaaaataaataacaagcgaagtgataatgaagacagtcccggagctatgtcagtttggtttacggacaacaccacattagctgtccgtacaaaatccaattatgacgacacctcaaactattcatatactaatctggtattgacagtgtatggctttacttctcaagatgtaggtgctggtctatagatggcagcacccaatagatattcatcgaagaattaaagctgtcgttcatgataaacgaccatgttgtaaaaagtaagtaagagagcatttgctctcttttttatttagaaaggagctaaacatggctaatatttttgttgatggtgatgaactaattacaaaaaatgatgttacattgcctaatgatttgttgcagaatgctaaatggtcaaaaattacatatgctggtacgggtagacagccagctaacccactagtatcaatgctttacgtaccttcagaaatggaggtggcgtaatgagcatttatgcaaatggtgttagattactggacgaaacagataaacaaccatcaaatttactaaaaggttcaagtgattttagcggtaagtggtataaaagcgatggagatgttattaatgtttcactttcatcttcaaaagatcccaattctaacttatcgagtatttacaactggtcttggggtggcatatgtcaaccattggcagcttatgctgatgaaatactaacatggggtgcatatataaaaatcgacaatccttctggaaatggaaatttacatgtttatgcgcaatctgaaaaaggaaatacaggtcaacttattaaagctacggtaggaaacactacttataatagtttgtctaatgattctactattatttcctacaaagcaaataagtctttagattgggtttggattacagccacttttaagatgacgcagaatgttaataagatgatgataagaattgaaaatgatgctggagcatcaattaacattggttcaatgattattacaaagtcatatgatctaccacaatggtatccaaatccgctagatgcaaacactaactttttaaatcttagagctgaaattcaagcattaaaatctaagctggggggataaaagcccactataggctttgttatgctgcttctttgaaggaggtggcgtagatgattgatgcttatctaaatgtaaacaagcttggattaattcataagacaaaacctgtttacctaagggtgaggtagaatgcaaactttatttaatatttagatagcacataatataagcggtcgttgatattgaacgacatacttatttaaagaaaggaaaataaaatggcagaattaaatgaaagtacattttggatctctggaattattaatggagaatacagagaatgtgatggtccatacaccaccacaaaggatatgagtgataaaggctatccttatgtaactaaaactccaaatccaaactttacacatcaaagatatgattacacagctcatgaatgggtagacacttcagatgatgctttacttcacactgtggaagatgtaaaagaggctgttactgaattaaaatcaaacagtcagtcaaatactcaatcaaatgatcaacttgataagaaattagataagcttactactttggtcattatgtcaaatgttcaagtaggtgaaatcagaaaagaattacaagcggttaagactcaaaaccagtctgcagctgctactcaacctactgaaccaacacaaaacaccacaccagcaattgaaggaggtaataagtaatgtttgagatttacaagtttgaatttgataacgattttatcagtcaagatgaattaagaagttacattgatatgggcttaattactcaagctgaataccaagaaatcgttggtggtagcaatgaagaagctaaaccagtggaaggctaaattaacaattagaaattgtgaactgttaattggtctttttattttaggtaaaggtgtttggctgtttcatgacagccactacttcatttatcctccacagtttgagaatattgaaaacagtagatacattgactgcttcctaattttgttaggaatcttgttaatgctatctgcttttttagttccgtatattagcaatactaaatacaaaatcatgctaattattgccagtaaagtatttcttgtaatagttggtattgtttgtatggttttagcattattgcaattaacgcatggcatctttactccattctatcgaatggggcattcagcatggggagatctgataatttttggatttgtttatctaactgcttgtgatgcctgaaagtgggtgtcatgagtgaattggggatacattattacagcaattggtggtgtgattagcgctataacgcttttttacaaagtttttgatagtagtaaacaacagtcactcaccacactgctacggcaaaaagatgaagaaattaagcagaaagaacaggacgctgaaatctacagaagaaaatggctagatgccgaaaaagacaatgatgaattaagaaagaagttaaaaaatgacgattaatcaaatcatggatttagtaatcacaatttcaagtgtagctttggtagtaattgtagctatctatactaaacataaagtagaaattgaccgtaaagctatgcaaggcaatgaacttgctaaagctgaacaattagtggctaagaccgttgaaccacttgtatatcaagctgaaaaatcaggtggtgatggtgatactaagtttactcaagtattgaacactgtacttggtattcttgatttagctcacttaccacatccttcaagccaatttattggcggtgaaattgaaaagagtgtagctgctatgaaaagaacacaaaatttgattgatactgtagaagataagccagcagacgaaggtaagaaggctgatactaatgcttaaaatgtgtgacgtgtattccgatagttctcgtagttttgctacacaatcaggtacagatattactatgattaaggcaacacaaggaatgtggtacgtaaatcctgaatgtgacgtagattaccaagcagctaaaaaagcaggaaaacaattaggaatttatcactattgtgaaggtggtaatcctgaaaaggaagctcaatacttctatcacaatgtaaaaggctatattggtgaagctgttcctgcagttgattgggaaagcaatgaaaaccgtagctggggcaataccacttgggtgaaacgttttgttactgaatttcatagacttagtggcgtatggtgtttagtttatgttcaatcatctgcattaaaccaagtagctaactgtgctaagacatgtggactatgggtagcatgttatccaagtatgaattggaagagctggaatgtccctaatatgaacgttccaacatcaccatggaaaacttataccatctggcaattcactggtgataacatggatagaaacttggttaataccactgttgaaggctggaaaaaattagctaagggcagtaagaccgtagctaagaagaaacctaactgggttaagaagtctggtgagtttatcttaggtgaagccttagcaattcacaaagaaccccacattgattcaccagctatcgctaagcttagcaaaggtagcgtagtgaagtatgatgcaactttgcaaggcccactaagattgtggttaagacagccacgatcaaacggtaaatgtggttatatcgttgctaaagacaagtatggtaaagcactaggaaaatttagataggaggaaactccaaatatcgtgcaataagccaccttggggaactatgtccctggggtggcttttttgtgttgtcactttatataaggaagaaaaaataatttactgttgcacaaatgttgcacaaaaggtttttaacttaaatttaggtaaaaaaataagcttgcaagatcagtgatctaacaagctcttggtctattaggcacgagtaactttaccagactttaaagccttggttgaaacccatacgcgctttggcttaccgtcaacaagaatgcgaactttttgaaggtttggcttccaagcacgacgagttgagttcaatgagtgtgaacgtttgttaccgaatgtagtcttcttacctgttacgtaatcttttgccatttgctaaacctcctttaattgtgatgtcatacttaattagattatcatatgttttcgcgcaattcaatactaaaaggattttttcaggtgtattttaattattgattatgtcgttactatgataaaataataaacgtatatatagataataagacggaggacgaaacatggctgttaagatcaagacaaaagatggtttgattgatatttcaaacggtgtaatcgcaactgttgttggtggcgcagctacgtctaactatggcgttgtaggtatggcatcaaagaatgccattcgcgatggatttgacgggattcttaatcgtgccaattataagcgcggtgttgttgtcaagtcagaagataacgaaattacggttgatgtgtacattattgttggttatggtttgaagatttctgaagtaagtaagaatgttcaagatagtgttaagttcaatttgaagaatcaattaggaatagacactaaggccgttaatgtcattgtacaaagcgttaaggtacttgacgaataacacaggcggaggttttaaatagtggttttaaatgagatagatagtaagcaatttagagatatggtacgtgttgccactcatcgaattggtaaaaatgcggagtttgttaactctttgaatgttttcccagttcctgatggtgatactggtactaatatgaacttaaccattgaaagtggtgctaaggctgtttcggaaaatccaagtactagtgttagtgatttaactgaaagcttggctaaaggtatgctaatgggtgcccgtggtaacagtggggttatcacttcacaattattccgtggcttttacaaggctacccaagggatgaagaccttaactgcacaggaattagcaaatgctttttcaaatggtgttgctactgcttataaggctgtaatgaagccagttgaaggtactattcttactgtagctcgtgttgctgcacaagccggtgctactaaggccaataacaccgacgatgtaactgaagtaatgaaagctgtagttgaaggtgctaagaaggctcttaagtcaactccagatttattgcctgttttgaagcaagttggtgtagttgactcaggtggtcaaggccttttgtttatctatgaaggctttttggaaggcttaatgggtgaaaactttgcagatcaatatcaacctgacgaaaatgaaatggatgaaatgatcaatgcaatgcaccaccaatcttcagttcaaagccaattggctactcaagatattaaaaatggttactgtactgaaatcatggttgatcttgatgccgatgtgccaaataaaaagaagtttgatttggaagaatttagaaagcacttgtctggcttgggcgattcattattagctgtttctgatggtgaaattgctaaggttcacgttcatactgaacaccctggtgatgttttccaatacggtagtcagtttggtcaattaggcaagatcaagattgataacatgagaatccaacacgaaagcatcgttgaccaagatgaagaacaacaagaagcagttgattttgcagtgatcgcagttgcttcaggtaacggtattcgtaagttgtttgaaagtgaaggggtaaaccgtattatctcgggtgggcaaacgatgaacccatcaactcaagactttattgatgcaatcaagaagtctggtgcgaagaaagctattgtcttgccaaacaacggtaatattgttatggctgctaagcaggctgctgaagttagtgatattccggttggtattgtaccaactaagactatttctcagggtttaaccgcaatgctttcattcaatccagatgcatctgttgatgaaaatgtggaagctatgacagaggacttagatacggttgtttcaggtgaagttactcaagctacccgtgatactgaaatcgatgaagtagaaattcataagaatgactacttgggaattgttgatggcaagattaaggttgacaatgctgatttaattaagactactgttgatatgattgaaaagatgctggatgaagattcagaaattatcacaattatgtttggccgtgatgctagtgaagagcaagcacaagaagtagttgaacaacttgaagccaaacatgatgatcttgaatttgaaattcatgatggtggtcaacctgtatatcacttcttagtatcagttgaataacaatgattgataatgcattatttgctcctgtcacagacttaaagggtgtagggacaaagactacagctgcattaggaagcttaggcatctatagtatttatgatttgcttttttactttccttttcgttatgacgaattacaaacattaccgttagatcaaatcatggatggtcaaaaagtaatgctaaagggaatagtagccactgaagcgtttgttagtcgttttggctataagaaaacgcgcttaagtttcaagatgagaattgaccatgatgtgatcatggtcaatttttttaatcagccgtggttaaaaaataaaattgagatcggacaagaagtagctatttatggtaaatacaatgttgcccggcaaagtttaacggcctttaaattcgtagcagccaaagaaaatgatagtggtatggcgccgatttatccggttaatcgacatgttaagcaaaaaaaattagtagatctaattaatgtggctattgacgattttattgatcaagtgcaggatattgtttcggaaaagttgcggcaagaatatcgtcttttaaaagaccaagtaattattgaaaaaatgcaccaccctaagaatagtcatgaggctgaactagctaagagaagtgcgatttttcgtgagttttttatttttgaattacaattagctttattgacccgtaatgatggtaaacaaatgggttatgcaaagaaatacgatctgacagaaattgctcaattaactaaatctctgccatttgaattatcagatgatcaaaagcatgtggttaatgaaatctttgctgatatgcattctgatggtcaaatgcggcgacttttgcagggtgatgttggttctggaaaaactgttgtagccgtttatgcgatttttgcagccattacagctggctatcaggcggctttgatggtgccaacagaaattctggcaactcagcatttcaaaaaaatcgatgaattgttgcgtcctttaggtgtgcgagtagctcttttaacaggcaatacaaaaacactggagcggtgtgagatctaccgtgaattaactgatggcacgattaatgtggtaattggcactcatgctttaattcaagatagtgttatctttaaaaaattaggtctagtcattattgatgagcagcaccgctttggtgtaggtcaaaggcaagctttgattaataaaggcgatcaaccagatattttggcaatgaccgctacgccaatcccgcggacgctggctttgacagtttatggtgatatgacagtctctgaaatacatcatttaccagccggaagaaagccaattatttccacatggaaaacaagtagtcaaatgaaggaagtctatcgacaaatgcaagagcagctaaatcaaggctttcagatttacgctgtgacaccattgattaccgagtcagagacgttagacttaaaaaatgcagaagaattgcatgaaaaattaagccatgattttcctaatcacaaggtagtcctgcttcatggtcaaatgccaggtgcgcaaaaagatgagattatgactgcatttgcagctggtgagatcgatattttagtaactaccagtgtgattgaagttggagttgatgtggctaatgccaatatgatggtgatttataatgctgatcgttttggcttaagtcaattgcaccaactgcgtggtcgaattggtcgaggacaaacacaaagttattgtgtctttctagctgatcctaagaccgattcaggtaaagcaagaatgaaaattattgcgtcgaccaatgacggcttcaaattagctgaagaagatttaaagatgcgcggtgaaggtgatttgtttggtaaggctcagtcaggattgccagaatttcgtgtgggtgatgtagtaaataactacaatacattggtcgttgcgcaaaaagaagcacgagctttggttgcggctgatcctgatttattagatccaggacataaggcacttaagcaagtgctagaatataagcaattagagcaaaacagaatttagaaaagattgtggtgaatatatgagaacaattgcaattgatgcgatgggtggcgaaaatgccccagatgcaatcgttaaggcggttttacaagctaaaactggaatgcctgagactaaatttttattatttggtgataaagaagcattaagaaaactaatccctgaagatcaaattaatgatcaattaggagttgtacctacaactgaagttattgctgatgaagatgaaccagttaaggcaatcagaaaaaagaaagactcttcaatggttgtggcagctaacttcgttaaggaaggaaaagctgatgcgttgctttccttaggcaatactggtgcattgcttgcttgtggaatttttattattggtcgaatcaaggggattgttcgtccaggtttgatgcctactttacctgttcaaaatagtgacgatggcttcaatatggttgatgttggtgctaatgctaagagtaagccagaatatcttttacaatgggccgaaatggcttcgtactatgctgagaagattcgcggcattaaaaatccgcgagtaatgctcttaaataatggagctgaaagcgacaagggtgatgatgttcaccaaaaggcctatgaattgcttaaagaaagtaatttgaatttcttaggtaatattgaaggtaatgaattgctattaggcaaggcagatgtggtagtaaccgatggctttaccggaaacgctgtacttaagaacattgaaggaacctctagcgtcttgcttcatttattaaaagatagtttattaaatggcggtgtaatgaccaagttaggtgccttaatggtgaagggctcgttatcaagcttaaaatctaaatttgatacggctaaatatggcggtgcagttttactaggcgttaatgcaccggtagttaaaacccacggtagatcaaatgaacgtccaatttatttcactcttaagcaagtagataaaatggttaaagaaaaacttgttgcagattttagagacgaattcgctgaaaaatagtacaatgttttattaaaaaggagaagttttatgtcagaagaagaaatttttaataaaattaaagacatgatcgctgataattttgatgttgataaggatgagatcactgaagacactaattttatgaacgatttggatgctgattcaattgatttggttgaatttatcttgcagctagaagatgaatttggcgcagaaattcctgatgatgaagctgaaaaaattaaaacaattggtgatgctgtttcatatattaagtctcatcaaggataattttctaaaaaaagccgtgtcgtgatttgcatacgaccggctttgtgtttagaattagaaaataaatagaaaagattaaatgcttttaataaaaaagctcgagatggaggaatgacctttggagaagcagagtgatcttttattagatattcaacacctgcatacggcataccgtttgcaagggaaattctatgatgcggcagacgatgttaatctgactctgaagcgcgacgagattttagccatcgttggtgaatctggttgtggtaagagtacaattgcctcaagtatcattggattgtacgaccataaaaatactaaagtaacaggggacattctttacaatgaattaaacctagttggcttgaatgaatcacttttcaataagattcgtggggacaagatcggaatgatcttccaggacccattagccagcttgaacccattgatgcgtgttggtgatcaagttgctgaaactctttattaccacactgatatggacgaaaaggcacgtcacgcacgtgtcattgaattgtttaatcaagtaggaatgccaaagcctgaagaaatgtacgaaatgtacccacatgagttgtctggtgggcttcgtcagcgtgttgtaattgcgatggcgattgcatgtaagcctgaagttattattgccgatgaaccaacaacagctttggatgttactattcaagctcaaattttggatttgcttgaagatattcaaaaacaatctcactcagggattattttgatcactcacgacttaggtgttgtagcagaaactgctgatgaagttgcagtcatgtatgctggtcaaattgttgaaaaatctgatgtaaagacaatttttgaaaacccacttcatccatatactcgatcattacttaactcaatgcctcaatcagacgatacggatgaagatcttcatgtaattcacggtactgtgccatctttgaagaatatgccacgtactggtgatagatttgctgcaagaattccttggattcctgctagcgcacatgaagaagaacctaaggtgcatgaagttgcgccaggtcactgggtaagatgtacttgctggaagtcattccactttgaggatgaaaagacagcaagtggggagtagtttatggcaaaagaaattattcaaatcaaagatttaaaggtctattacccaattcgctctggattttggaacagaattactgattatgtacgtgccgttgatgggattaatttttcaattggtgaaggtgaaacttacggtttaatcggtgaatctggttctggcaaatctactaccggtaaggcgattgttggggttgaaaaagttacaagtggtcaaatcatgtataagggtttggacgtaactaaggcaagcaaccgtaagaagcttgattataataaagatgttcaaatgatcttccaggattcaatgtcaagtttgaacccaagaaagagaattgaagatatcattgcagagccaattagaaactttgaaaatctgactactgatcaagaacgtgatcgtgttcaagaattgttggatattgtagggatgcctagtgatgcgatctacaagtacccacatgaattctcaggtggtcagcgtcagagaatcggtgttgctcgtgccgttgctactaaccctaagttaattgttgcggatgaaccaacgtctgctttggacttgtcagttcaagcacaggttttgaacttcatgaagcacattcaacaacaatacaacattgcttacttgttcatttcacacgacttgggtgttgttaagcacatgtcagaaaacttggcaatcatgcaccgtggtcgtttggttgaattaggtagccgtgaagaaatctacaagcacccaattcacatctatactaagcgtttgctttccgctattcctcaagttgatgttgaacatcgtgaagaacacaagaaacatcgcgaacaagttgaaaaagaatttgaagaaaatcaaagtaaatggtacgacaaggatggtcgtgtatatccattacaacaagtagcacctaagcactgggtagctttgccaaaagatatggcccacgaagctaaacttgaagaattagaagaaaaggagagtgattaagcatgtggaaaacgattttacggcgtttgttaatcatgatccctcaattgattatcttgagtttgctggtcttccttttggctaaaatgatgcctggtgacccattcagtggatcaattaaccctaacaccgaccctaaacaaattgaagccttaaaacgggctgcaggtctgtttgatccatggtacgtgcaatactttagatgggtgggcaacttgttccatggtgaccttggtacaagttacattcaacatgtgccagtaacttcattgattgctgaccgtgctaacaacaccttctggttatcacttttaactactattttgacttatagtattgctatccctcttggtattacttcaggtcgtcaccaagacgaatggcaagatactagtgttagaatttttaactacatcaccttggctaccccaggattcgtattctacatcttaggtttgtggctcttcggtttcaccttgggttggttcccaatttctggttctgtttcagctagtgcctctggtttctggggcgtacttggcagtagaatctatcacatgattttgccagcaattctgtatgccttgattactactactggtactgttcagtacttaagaactgggattgttgataacaaggttgaagattacgtaagaactgctcgtagtaagggtgttccagaaagcgtcgtcttccataagcacattttgcgtaactcattattgccaatcgctgccttcttaggtaacacgattaccggtcttcttagtggttcaatgatcattgaaagtgtatttagttatcctggtatgggtaagttgttccttgactcaattgggcaacgtgactacactaccttgactgccttgattcttatctttggtatcttaactttaatcggtaacttattatcagatatcatcatgagtatcattgacccacgtattagaattcaataggaaggagagaaaaaatggctgataagaaagaaaaagctacaaagaaagctactaaaaaagacgaaaagcaaaaagcaactctcccaccttctggattcaaggtggcaatgcgtgaaattgtgcgttcaaagtctgctttaactgctctgattatcattattgtcattttactgtttacttttggaggttcattattcttgaatcgtgcccaagtaacagaaatgaatattgctgactcatactatggttggggtgaagcgggccacttgctaggtacggatgatggtggtcgtgatatcttgaagttgctcatcatgggtgggcgtaactcaatcatgatcggtatctcagtaactgtaattactgaaatagttggtttagtagttggtttggtatcaggctactttggtggtgcaatcgactcagttatcatgagagttgttgacttcattcagattttgccacaaatgccaattattattgttttgactactgttatccctaactacaatgctgtaactttggtattcttgattgcgatgtttgggtggacaacgacggcacgttacttccgttccttcgtcttatcacagcgtggtcgtgactatgttttagcatctaagacttcaggttcatctaatttacaaattatgttccgtgaagttttgccaaacattacttcaatgattattatcgacgttgtattgagtattgcaggtaacattggtattgaaactagtctttcattcttgaactatggtttaccaagtaccacgccatcacttggtactttgattggttttgctaatgacccagttaacgttattaaccgtccatggttgtggttgccagctactatcttgcttttggtaatttccttaagtattaactatgttggtcaagccttacaacgtgctggtgacgcaagacaacgtgaaaactaataaagtaataattaaattaaaacagctctatcgcttggtagagctgtttttgcatatttataactagaatcttattgaaagcaaataaaataaaaattaaaaataatttcataaaactattgaatttttaatttatggtggtattatttaatcatcaacctgattcaaataactattgaaaatgaattgtatcctagatgggggaaacaaagtatgaaattatcaaaagtattgggttcagtaggagtcgtttctgcggcagcgttagctttagttgcttgtggtaagagtagcagtaacaatgctggcgcaaaggatgccaagaagtttaaggaaactactccagttaaggcagtcaaaaagggcggcactttatcatatgctgaagaaactgatacaccttttacaggtatttttaacaatgaattatcaacttctgctattgacacagatgtagcacagtttggtaatgaatcattatttgatactgatgacagttacaagattaatagcaagggacctgcaacttttaagttggaccgtaaagctaagactatcactaagtgtataattttttacggtaagttgaataaataattaaaaaagcccaagtcctttgaatttggacttgagctcaaacaaaaagaccagtagtctgatgttaagaacaaaaaacacattagaagctggtcttttatgaattcaattgtaactgaaatcgcaaatattataaagtctgaagataattatattaagcgtgaaagaaaaataatctgtttcttcttaaacctgattaaggaaatcatggccttggctttagctaaagttgatgatgaaatgattaccaaggttaaagcacagggctatcagattgataagaagaatgagcgctcaatcaatatggcttttggcgaagttaggtatgtcagaagaagatatgtctgcccaggcaaacaagcaaggtatcccttggatgaattaatgggcttttacaaatacaagcgctacagtattttagcagtcaaaaacatcttagaagtaagcagcgttgccacttatcgcaatactgctctagcagtcaattgcctgtctggctttaatattagccatatgcaggtgggcaatttggtaaaaatggccgggaaaaatattaaagcgggccaagaagcagattcaagatatgatgccgcaggcactaagaaaaaggtcccagttttgtatcttgaaggcgatggcgtggtgatcaaaggcactaaaagccggttggaatttcatcgctatcaggtctgtgaaggcattgtcaatataagcaagaaacgcagaaagcgaatcaatgccaaggaatttgtttctttaagccgacttgatgcgctgaacgaagccaaggagtacctggccaatacttatgatctttctgatactgtaattcttagcaacgccgatggcggtgctggatatgccaaaacagacttcgatgacattgtagggctatgcaagcgtcatgagcatttcttggatgtctttcacctaaataagaaaatcaaagaaaggctatattttgcgcctgacctgcaaggcaagctgatttctgctttggaatacaaatacagctatgacaaagttaaaactatcctaaccactgcagaaagccgactaattgatgaattgaataccgagctcaatcatgattatctggggcgcctaaggaattatattgatcgtcattgggacgatattaagccgtttaagaaatgaaaactgactgtgactaaagccattggctgctgcgagagcaaccaccgcaagtatacctaccgtgttaaggggcaaggcaagaaatggtcaaaatctggagcagaaggcatgcttaggatcttaagctgcatcaagaatcgagagctggaattttggcttagcagcgagtttgaagattcagaaataactgtattgactgaacaggaattaaaagcagcggcccgtgacagcttaaagaagcgtcatgaagttcatttaggcatccagcatggcgcattaaccgcacaggtagctggcaatagttatttaagcaagctaagcagaaatttaagtcatataaatatttaagaaattaaggttagactaatggtttaaaggctaccgcaaaaacattgacacttacagactatcactattgaagttaaaaaaggtgttaagtggtaagatggtaagcaggttactgcaaaagatgtagagtatgaatatgaagttatggctaacaagggcacaaagtctcaacgttatactgcttcacttcaaaacattgttggtgtaactgaatatcatgatggcaaagctaagactatttcaggtattgatatgccagatggagcaaatggacgtaaagttgtaattcactttaaggaaatgaaacctgggatgcttcaatcaggtaacggatacttcctcgaaaccgcaagtccatatcatcaattaaagagtattccatttaataagcttgaatcatcagatgctgttcgtaagaatcctttgttctttgggccatacaagattagtaaaattgttcgtggtcaatcagtaacttgggttcctaataaatactactggagaggtactccaaaattagataaaattacggtatctgtagttaaccctaactctgcttctcaagctattaagagtcacaaatttgatattgctagagttgttaattcacaatggcaacaggttaagaacactaaaggtgttaactttgttgctaaagtaccacttcaatacagctacatgggcttcaaggttggtaagtgggaaaatggtaagaatgtcatgaacccaaaggcaaagatgaacaataagtcacttcgtcaagcaatggcctatgcaatgaacattgatgctgtggaaaagcgttatactcaaggcttaacattcagagtacctactttaattcctgaacaatttggaaattactttgacaaaaatattaagggatacaattataaccttaaaaaggctaataagttacttgatgacgctggctacaagaagaaaggtaagtatcgtgttcaaccaaatggtaagcctttgaccattcaccttgcagctatgtctggtagttctactgctgaaccaattactcagaactacattcaacaatggaagaagatcggcttgaatgttaagttaacaactggtcgtctaattgaattcaattcattctatgataaagttcaacatgactctaaagacgttgatgtattcatggctggttggtcactatctagcgaaccttctcctaacgatctttacaatgaaaaggcaccatttaactacactcgtttcgtaactaagaagaatactcagcttcttaaggacattgactcacaaaaggcatttaataataaatacagagtacaaaaattccacgaatggcagaagtatatgtttgatgaagcatatgttgtgccaacagttaatgcataccaaattgacgctgtgaatagtaagcttactggctactcacttaagccttcagatgctaactcagtttggtacaatgttggttacgctaagtaattcattaatcattagtaaaactaaactccaaaattctaaacataaacaaattccttatattaaattctaataactaactaatagaaaagacaggtatcttaatccaaatacctgtctttttcatgctattgttatgtttttgtaatagtgataaaattaaaggatcaacttgctccaagtaatggaggaattttactaatgaaaaaggcaaaactttttgctggtattacactgttatcaggtgtagctcttaccttagctgcctgtggtaagtcagaatctcattctgatgaatcaaagactgcttctaagtttaaggaagctgttcctactaaggctactaagaatggcggtactgttaaggttgctgttgaagctgataccccatttactggtatcttcaacgacgaactttcaacttcagctactgatactgaagttatgcaatatggtgcagaatcactttttggtactgatgatcactatgttttcaatgataaaggtgctgcaacaattaaggttgaccaaaaagctaagaccgtaactgttgaaattaagaagggtgttaagtggtcagatggtaagcaagttactgccaaggactatgaatacgcttatgaaattattgctaacaaagacactaagtcacaacgttacacttcaagtttagctgatttggaaggcttacaagaataccatgaaggtaagtcaaagactatctcaggctttgaaatgccagatggtgaaaacggccgtaaagcagttcttcactttaagacgatgaaacctggtatgaacacttcaggtaatggttacatttgggaagctgctgctccttaccactacttgaaagatgttaaattcaaggacttaatgtcaagtgataagatccgtaagaagccattgttctttggtgcttacaagttgcaaaaggttgttcgtggtcaatcagtaacttgggttcctaacgaatactactacaagggtaagccaaagctttcaaagattactgctacagtaattaaccctaactcagttgctcaaagtattaagtccagaaaatttgacgttactcaagtaatcaactcacaatggaagaacatcaaggatactaagggcgttaactttatcgctaaaattccactacaatactcatacttaggctttaaggttggtaagtgggatgccaagaagggcgaaaacgtaatggacaagaattctaagatgaataacaaggccttacgtcaagctattggttatggtatgaatgttaaccaagtttacaagcgctactcattcggtttatcattcagaattccaactttaattcctaagcaattcggtgattacttcgacaagaacatcaagggttacacttacaatatcaagaagggtaacgaaatcttggacaaggctggctacaagaagaagggtacttaccgtgtacaacctaatggcaagcctttaactattcgtttagctgctatgactggtagttcaacagcagaaccaatcgttcaaaactacatccaacaatggaagaagatgggcttgaacgttaagttaactagtggtcgtttaatcgaattcaattcattctacgacaaggttcaaaacgatgatccatcagtagatatgtttattggtgcatggtcattatcaagtgaaccatcacctaatgacttgtatagcgaaaaggctccaatgaactactcacgtttcgtaactcctgaaaacaccaagttacttgacgaaatggattcacagaaggccttcaaccacaagtacagagttgaaaaattccaagaatggcaaaagtacatgtttgatgaagcttacgtaattcctatagctaatagttactcaattactgccgttaacaagaagcttactggttactcacttaagccatcggattcaatgggtaatggtttccctaactggtacaatgttgcttacgctaagtaaagcaattatttaaaattacaaaagactgtttctaaattttagaagcagtcttttttctgtgacccgaaaactggtataatttataggtataaaaaggggcatttttatggtaagtacaaagtttttaaaaaaattaaaagacgattataatatcgaatttaacaatgaaaagctattagaagaagcatttacgcattcttcatattcaaatgaacatcccaatgatggaattcgcgattatgaaaaactcgaatttcttggtgatgctgtgctagaattagccgtttcgaattatgtttatcttcattatcctaagttgaatgaaggtgaattaactcgtttgagatctaatattgtccgaactgaaggattttcagaattcgccattgaatgtggttttcaagatgagattcacttgggcaatggtgaagaaaaagctggagcacgacaccgcaaaactttactggaagacgtgtttgaagctttcaatggggcacttttccttgatcaagggatgccagcagttgaacattttttgcatttaacagtttatccattgattgataagggtgaattcgatgattcacgcgactataagacagacttgcaggaagtattgcagcaagatggtcctgtgaatatcgaatacaccgttattagtgaatctcaattaccttcacactttgttgttgaactaaaaattaacggaaaagttgaatcaaaaggtgagggtcacaataagaaagcagctgaacaacaagctgctaaggtcgctttacaaaaattagaaaaataaggggatgaaaaagtgccattaacagaattagtgctcgatggttttaaatcattcgctgataagacaactattcattttgatgatggaattactggaatcgttggtcctaatggttcggggaaaagtaacattactgaagccgtacgttgggtaatgggtgaatccagtgctaagtcactacgtggaacgaatatgaaggatgtcatctttgccggtagtcaatttcgcaagccgctcaataaggcggaagttactttagtttttgataataaagagcgtgagttggcttttgattcagatcaggtctcaattactagaagatttctgcgatcaggtgacagtgaatttttaattaataatcagcaagtgcggatgcgagatgtgcggacactctttcttgattctggaatttcacctaatagcctagcaattatttctcagggtcgagttgatcagatcttaaattctcgtcctgaacaaagaagagtaatctttgaagaagctgctggtgttttgcattttaaacaacaaaaagaagctgccaaggcgcaaatggagaaaaccaaggataatttaattagaatcaatgacttggttaaagaacttgaaggtcgattggagccgctgcatgagcaaagttcgctggctaaagaatatcaatttcaaaagaagggactagatcagaaattaaaaagtctattagcttttgaaattgaggatttaaaccggcaaaaagaagaagtccaaaaagcagcagataggaaccaaatcctgttaacaaaactggataatgaagtaaaaggttcgcaaagtgctgtttctgaaaaacgggcagaatatcaaaaaattcaaaatgagcgagagcaaacgcagagtgaattattaaagctaagtgaccaattatcacagatcaatactaacttgcaggtcgcacagcaatcacaacagtttaataattcaactagggtagaaactcaacgtcaagttgaagaattgaaaaatagcttggttaagctaaaggatgaattgtctgaactgcagcggaataaaaagcaacttaagcaggagcaagatgctttacaagagcagcatgatcaattgactggtaaattgcacgatgatccagaagaattgagtaagcgactagaagattgtcgtaacgactatattcaacttttacaagatcaggctacaactaataatcagattgttaatctgaatactgaattaaaacgtagtcaggcagacactacttatcaaaatagtgatgtaagcaagcagctaaccgatgctcggactgaactggaaaagctgagaactgaaggcaagcagctgacagttaagcggcaaaaggaaaaagaaaaatttgcgcaagttaatgatcaaaataatgatttaactaaacagattaatcagattcggcaagccgttaacgcagagcgcagtaaattagagaaagttgaagcgcgacatgaagctttagtaaatattcaaaagcggcatgagggttattactacggtgtacgtaatgttttgaatcatctatctgatttccctggtgtgatcggggctgtgggtgaattgattacatttccagttgagctagaagctgcaatgacgacagctcttggcggtggcgtacaggatttgattactgaaagcagagttagtgctagggatgcaattaatcaattaaagcgtagtcgtagtggacgagctacttttttaccattagatggcttgcgtcaatatactattccacagtcaactatcactactttgcaatcttttagtggctttaagggcgtagcaagtgatttagttgaaagtaaagccgatcaagatattactgctgcgattaattatttgctgggtagtgtgattatcgttgatacgattgatagtgcaatgtcaatttcacgtcgagttaaccgctatcggattgttaccttagatggcgatgtgatttccccaggtggttcgatgactggtggtcaaagaaaccaacgtaataattcaccactgcagacggcaactgaaattaatcagttagagaagcaattacagactttacgacaaaatttggctgaagatcaagaacggttagatgagctagttactcaaggtgaaaaagttgcggctaaattgcaacaactgcgtgatactttgcaggagactaatcaagcgattaatgaagctgctatttctttccaaaatcaagaaaaggaagtaaagcggctaactgatgctaatagtttatataaatctcgagtaaaagaacaacaagatcggattgctgctttaaagaaagaaatcactcaggctaatgatcagcaggaacaattggctaagcaaaatgaagtacaaaagggcaaaatgaatgacttgcaagaaaagattaagaacttcaatagcttaagtcaacgtgtacaagaggaattatcaaagcttgatcctcaaattgcagtttatactaataagttggaaaacttagctagtcaggaaaaagaaaaaaatattcagatcactaataatcagaagcaaactgatagcttagagcagaaattaactgaattaagtcaaaatggtgaattatcagttaaaaagaattctgatttacaaacacaaaaagctgaaattaagcaaaagaatgaaactctgcaaaagaagctgaatgaacttagtgcgcaattaggacaagttgatgcgcagattaatcaacttgaccaagttgccagtcgtaattatgatttacgcaaagatgcagcaattgaacaagaagattactcagtaaagattgcgaagtttaattccgcaattgatcagcgcttgtcaactttgagtgaagagtatgccttaacgtttgaagctgctttagagcaagcagaaggcgaaaatactgaagaaaagcgcaatgaactggctaaaagcgtgaagttgcatcacatgtcaattgaagatattggccaagtaaatcttgattctattcaagaatatgaagatgtgaaaaagcgctatgactttttgaatggtcagcaaaatgacctgttaaaagctcgtgatgaccttgaaaagtcaatgaacgagttagatgaagaagttaagacgcgcttcaagagtacctttaatcaagtagcatctagctttaagagtatttttccagttgtctttggtggcggtaaagctagattggaactcactgagcctaataatttgctagaaactggaattgagattatcgcacagccgcctggcaaaaagcagcaacgtttaagtctgctttctggtggtgaacgcgcgttaaccgcaattactttgttgtttgccatgttgcaggttaatccggtaccattttgtgtacttgatgaagtagaagctgccctggatgatgcaaacgttactcgttttgcgcaatttttgcttaaatacgatatgaaaacccaattcatcgtgatcacgcatagacgagggacgatgcggcaggctgaccaactatatggtgtggttatgcaagaatctggcgtttcgcaagtattgtcggtttcattaaaagaaatgaagaataaaaatgaggtgaaatagttgggtttatttgatcgaataaaaaaatcactctttggtaaaaaagacgaagaggatgaaaacaaaaaagaagaaaaacagactgagcaagaaaatgaagctaagactgaatcagaagataatgatcaagaatctgaaaaagtagttgatgaagctaaatcgaaaactgaaactactgatgaagaagaacaaacagtagaagcacaagaagactctgaggtagaagctgaatctggtgatgaagaaaaagcagtagatttagattctaaacaacagcctgaagaagttaaagtagaagagactactgagactgaaacagaagaacaagttgaagaaactgaagtttctgatgaggagccaacagaatcacaagaacagctttatgaaaaggggctagaaaagactaacaagggatttggtgcaagacttaacgccttttttgccaagtttagaacagttgatgaagatttcttcgatgatctagaagacttattaattgaatctgacgttggctatgaaactgctgaacaattaactaatgaattgcgtgaagaggctaaattgcaaaatgctaagtcacgtgatgacttgaagcgagtaatcgttgaaaagttggttgacctttacgataaaggtggcaatagcgaagatgagcaattgacgtataatgctgaagctaaacctaacgtttacctacttgttggtgttaatggtgcaggtaaaactactacaatcggtaagttagccaaacgttttaaggatgaaggaaagtcagtaattttagctgcggccgatacctttagagcgggtgccgttgaacagctagttgaatggggaaaacgtgttgacgtacccgtagttactggtaaagaaaaggctgatcctgcttctgttgtttatgatgcaactgaacgggcaatcagggaaaaagctgactatcttttagtcgatactgcgggacgcttacaaaataagaagaatttaatggctgaattggaaaaaattcaaagaacaatcaagaagcttttaccagatcagccaacagaaaccttgcttgtgttagatggttcaaccgggcaaaatgcgcttttgcaagccaaagactttgacaagaccaccgaattaactgggcttgttttaactaagttggacggctcatctaagggtggtgtagttctagctatccgtaacgaaatgaatttgccggttaaattggttggcttaggcgaaagagctgaagacttagctgattttgatgctgcaaattatgcgatcggtcttttccacggcttggtctagtgataaagttagagatgtaaatattgttttataaggagaattttatgaaagaatatagtgcttgtactactatcttagttggtaaaaatgcctcgattgatggcaccactatgattgctcgtaatgatgacacttttcgtccaattaccccacaaaagttcattattgagccagcccgtcatggtgaaaagaaacatattaagtcatggttaaacaagtttgaaatggacttgccagaagatgcgcaacgtgtaccagctgttcctaatgttgactacaagcatcgtggctactacgatgaaagtggaattaaccaagaaaacgttgcaatgtcatgtactgaatcaacttatggtaatgagagaactttagcatttgatccacttgttaaagatggattagatgaagactgcatgcagacttctgttttgccatacattcattcagctcgtgatggtgtacaatatttaggtaagttaattgctaagtacggttcaccagctggtaactcagttttattcagtgataaagatgaaatttggtacatggaaattgttacaggtcaccactgggtagccgagcgcattccagatgattgttacgctgcaactggtaatcgagttgcgattgaacaagttgactttgataatcctgattacttcatgtggagtaaaggtattcaagaatttgttgaagaacaccatttgaacccagatcatgaaggctggaacttccgtcatatttttggtacctatactgaacaagatcgtcactacaacaccaaccgtcaatggtatattcaaaaattgttcaatcccgaaattgaacaaaacccacaagatggcgatattccatttattcgtaaggcagctaagaagatcactaaggaagatattcaatttgctttaggttcacactaccaagataccccgtatgatccatttggtaagggtacggatgaagaaaaacatcgctaccgtccaatcggtttgaaccgtacgcaaaatgctcatattttgcaaattagaagtgatgttccagcagatcgtgcggctattatgtggttatgtatcggtggtccaactttcactccatttgtaccattctttgctaatatgaatgatactgatccttcatataacaatacctcaatggattacaatatgaatgatgcatggtggtattacaagtcatttgcagctatcgttgaaagtcattacccacaatttgttcagcttgatactacttatttaactgaacttaaccgctacttcagaggtcgagttgaagaaattattgctggtgcagaaggtaaatcaggtgatgaattaactgaatatttgactaaggaaaatcaaaagactgttgcccatactcgtaaggaaactgaaaagctttggggtcaaatgatgattgaatcgatcaacatgtccaaacttactttcaatatggatgaaaatctttaataaattcaaaacagctcgaaaaagggctgttttttataatatgtgaaatgaaaggaatatagacaatggcagaaggtactattggctcattttttactaagattaacaatgaagttgaaaaacaaatgaataacgatttaaaaaatttggtattaatgctaatgaattggaaatgcttattgaattaaatcatcatcagcatggcaaaacttttgaaaagttggctaaagaattgcatgtaactaatgacaaggtcaaatctttgacaaaaaaattggctgccaaagatttgtgcaagaaatttgaaaagcaccgtgcagaaactgaccaaactattacagggatgctcagtaaagatgaaactcttggcttggttaatgtactgaaaaagatgcttaagtcgagtgaagacaataagtaatgtaaaatagtagaactccagaagttaattacttttggagtttttttatgcaaaaattattgacaaatctttaatataatattactgtattaagtaaatagaacagtaatattattagtgaaaggataaaaatgtcagaaattttaagagtggatcaagtaactaagacttatggtaaaaaaggtgagaagcaataccaagctttaaaaggaattagctttgccattgaacaaggtgaattcgttggcattatgggtgcttctggttcaggaaagacaactttattgaatatcttgtcgacgttagataagccaactagtggacatgttttagtcaataagcaagacattactgcacttaagaacaatcaaatggcagattttcgcggaaaagaaattggctttatttttcaagatttcaacttgctagataatttgactaatcgcgagaatatagccttgccattatcgcttcaaggagtgaaggcaaaggatattgacggaaaagcaatggcgattgccaaaagattgggaatagaatctatcttggacaaatacccagctgaaatttctggtggtcaaaaacagcgtgttgcttcagctcgagcattggtccataatccggcaattttatatggtgatgaacctacaggagctttagattcacaatcagctacggaattattgaaaacaatggcagacttgaataagaatgatcaagtttcgattctgatggtaacgcatgatccttattcagcttcttacgctcaaagaattttgttcatcaaagatggaaaaatcggcaaagaaattaaaaaagaaaataagaccagagaagaattttatcaagatattattgctgaattaggtagacgttagagggaggtatagacgtgctttggaaattatcactaacagggctaaaaagtcgctttaaagattatgctgttttgttttcggggctaactctagctgctgcaatcttttatatgtttatgaccattgcaattaatccagcttttcttaagggttcaatggccattgccttttcaattacccagatggtctttatttttgggatagcgctattagctattattaccctagtctatattgtttacgcaaatagttttttgcttagtatgcgtaaaaaagattatggtacttatatgatcctaggagcgagaaatagtaaaattggccgtttaatttttacagagacggttgttattggtttactcgctactgcattaggaattttaattggtatcggcttgactcaagttgtttctcagttattaatctctcaactgggtttgcagctgcataaattcttaggcttttatttaccggctattttatggacagttgttttctttgtagttttatttttcttggctgcaatttggaatcggcacaaattggtaagtactagtgtaatcaagcttttgcatgaggatcaaaaaccagttaagttacgtaataaccgaatctggaaagcaactgaagtaattctaggccttgcccttctagccattggctactgggcaatgtgggattaccatcagttgcaaattaaatcggttgaaattggttttgtcactattttggctggttcatattttgtatttgattctgtatttactacagttatcaatgctttacggaaaaataaaaagtttaaatacagtaaactgcattcttttaccttaggtcagctaaaatttaggttaggtgattacaatagagttttaactgttatttccttgctttttgctctagcattaggtgcgatcactgttggattaaactttaataatatgacagagactgctcttcaggcaacatattatgatgctgtgttgtataaaagggatgctaaagttaatcaacaacttaaaaaagttgccgttagaaaacaaacgactttgaattataaggtcaatgggaaaaagaagtttcctgttctatatgttactgaccaagaaattgctaagaaaaaaatcaaattccaatctggtcgaaagaacggcgaccaaatgaattggaagacaaagacgattacagttgcaggtgtaaagaataaaaaacaagagatgaatttccaacttgctagtttaacaccttattctgattatgaggttaaagttgtaactccagctgaatatgtgaagattcctggaaaaaacaaacaagtaaccttgctattaatcaataactttagaagtaattttaataatattgaaaaattgcaaaagatgtcacttgaccagacagttactaaggatgcacaaggagtttatgtttctctgaataattctaaatctgctcaatatcgcttagtagcaagcgttgcgtcaggttttgaatttatgggcttcttcttaggcttagctttcttagctatgttagcttcaaccttaatgtttaaagtgctatcaggagcaaacagtgatcgtcctcgatatgaaatgttgtggaaggtcggatcaagacgtaagttattaaagagctcgattaaagcggagattggtaccttgttcgctttaccggctgtcttgggtgtgattgatgtattatttggactacaatttttcaaagggattttagctaatccatacgataaaatttggattccatttacgatctttttagtattgtatttgctttattacttaattacagtaaaactctatgaaggaattgtattgaaaaaataatggtacgaaaaaagatctgcaaaatgcagatctttttaactgtatttagattaattttatttattttgcttatttaaaattgaatgacgaacaccatagctaaagtaaatgattaagcctaaaataaaccaaataccagcataaaatttagcttggtagtcaagccctaagaagacaattaaagcagccatgaaacctaaagcaggtaaaactggataaaatggcatcttgaatgaaggatcatcaatgtcttttccttcacgtggacgcaacttataaatacctaaagaaacaaacataaaagcaattaaagtaccagctgaaaccaattgtgacaacatggagaaggggaaaaatgctccaagtaaaattgctacgattgttaatgtccataaagcattattaggtcgacgatctgcattcaacttgcccagccatttaggaagcatctcgtcacggccaaatgaatagatcaatcttgaaccggccatactcatcccaatcaaagcagtgaacatccctaaaacagcaatggtttggacaatgatggcaacaattggatgaccagcaaaccgtaaggctaaacccactggttcagcggaattagcatacttctgataaggcataattccaattaaaactaaactaactccgacaaataaagtaacagcaatagcaagtgagcctaaaatgctgcgaggcatagttttttgtggattaattgcctcagctgagttagcggcgattgaatcaaagccaatgtaagataagaaaatcattgaaacaccagcatagattccttgccagccaccgaatggaccgttagcagtcatcttgtatttcggtataaatggggtgaagttaacttttttaattgcaaaaacgccaacggcaataaagagtagaatggctaacacctttaatacaactaaggcattttcaacgcgagctgcccttgaaacaccatgaccaattaataaggcaactaacaagattgaaactaaagaaatgatatcaataataccaccgttattgccaaaggcgttagataatgacgcgggtagtttccaacctaatggtgcgattagagctctaaagttagcagaaagccccgaaccgacgaaagccaaagcaatgaaatattctgctagaagggcccatcctgctacccaaccccagaattctcctaaaactacgttgatccatgaataagctgatcctgcaaatggcattgcagcagccatttctgcataggcaaaagccactaaaccagcagcgattgctgctaaaataaaggaaatcgctactgcagggccggtatgcttagctgcaacttcaccaggtagagtgaaaattgaagcggagacgattgttccaacacctagagctaagaagtcctttacttttaatgagcgcaccaggtgtccatctttattttcatagacgcgtggatcttctttactgttcattctctgccaaagattcacaacgcaacttcctccttatgttaaaatatattcatctaattataattaaaagtacgttaaaaaatcaactattacatatttgaaattccactttttttagaaattgttatctaagataggttaatctagcactagcttatgacctttgttatactaaagactggtgaaaatcaatggatgaactaactaaaaacgaggagctaggcgatttatatgcctactatggctctttattaacccaggggcaacaatcttattttgaagactattactacaatgatttgtctctaggcgaaatagctgctaatcatcaagtatctcgtcaggctgtctatgataatctcaagcgctcaagtaaaattcttcagaactatgaagagaaattgcatatgaagcgcgacaacaatcaggttgaagatgtcttggcagatacgcttttatctttagataatggtgatagtgaagctgctaaaaaagaaataaccaatttattaaatcaattgaggggagaatagcccatggcttttgaaaatttaagtgaaagaattcaaaaagcattaaaaaatttaactggcaaaggtaaggtctcagaagaagatattaataaggctagtcgtgaaattcgacttgctttgttagaagccgacgttaactttaaggtcgttaaggactttattaaaaccattaagaaagaagcccttggcaaggaagttcaggaaagtttaaacccaggtcaacaagtaattaagatcgttaatgaacagttaacgaagatgatgggtgaagaagcagttcctttaaacaagtctaagcatattccaactatcattatgatggttggtttgcagggaactggtaagactacgactgtgggtaaattagcctatcatttgcaaaagaccgaaaaggcccgtccgctgttgatagctggcgatatttatcgtccggctgctgttgatcaattgaaacaaattggtgatcagttaaaagttccagtatatagtgaagacggagaaaaagacgtagctaaaattgttcaagatggacttgcagaggctgaaaagaacaagaatgactatgttttgatcgatacagctggtcgtttagaaatcgatgaacctttaatggaagaattagagcgggtaaagaaagtaacccatcctgataacattcttttagtcgttgatgccatgactggtcaggcggcaacagatgtagccaaaggctttgacgaacgccttgatgttacgggcgtgattttgactaagttagatggtgatactcgtggtggtgcagctctttcaattcgtgcggtaactggtaagccgatcttatttactggtcaaggtgaaaaattaagcgatttagatgttttccatccagatagaatggcatccagaattttaggtatgggtgacatgctttccttaattgaaaaagcccaacaagattatgatgctaaggaagctgaaaaagtcgctgaaaagatgcgggaaaatacttttgacttcaatgattttgttgatcaattgcaacaagttcaaaaaatggggcctcttgaccaaatcatgaagatgattccgggactatctaataatccgcaattaaagaatctaaatgttgatcaaaagcaaattgatcatactgaagcaattgtttattcaatgactcctgaggaacgagaaaatcctgatatgcttaatccaagccgtcgccgaagaatagctgctggttcaggtcgtcctgtagttgaagtcaataggatgattaagcagtttaagcaaatgcgcgacatgatgagtaaaatgtctaaaggaaatatgaagggcttgagcaatttgcctggaatggattcgccaatggctaagatggcaatgcgccgaatgaacaagaatttcaagaaaaataagaagaagcgtttacgcaaggtaaaaagattccattcttaaaaaataaactgttaaggaaaaatactttacacctgttaagtttggtggtatattattaatcgttaagttttaggaggaaattaatttatgtcagttaaaattcgtatgcaccgtgctggtgccaagagaaagccattttacagaatcgttgttgcagactcacgtatgccacgtgatggtcgcttcatcgaacaagttggttactacaacccagtttcacaaccaaaggaattgaagcttgacgaagacaagatctttgaatggttacaaaaaggtgcacaaccttcagacactgttagatcacttctttcaggtgctggcttgatggctaagttgcacgatgcaaaatacaataagtaattttgctattaattaagagcttgatgccgtgtgcttcaagctttttttatacctaaaggagaaaaaatggaatattacgatgttgctcggattttaactacgcacggtttgaatggtgaagttaaagttagtataattactgatttccctgaagatcgttttgctatagggatgcatttggcaatcaaaggtgaaacttctcaagttttaactgtggccaagagtagaccttttaagcaattttggttagttcaatttgcagagattactgatattgatcaagctgaaaaattaaaaggaaaaatactagttgttagtgaagccgaccgcggtgaactacctgaaggcgtttattattataaggacatctttgactgtgatgtcattgatgaagaatccggtaagcgcttgggtaaaatcactgatattgaatcgcctggtgctaatgatatttggctagtccatgaagataatggtaaagagtattggattcctaatattgcatcggtggttaaaaaagtagatgtagctaataaaaaagtctatgttgagttattggagggcttacgcgatgaagattaatgtattgacactttttcctgatatgtttgctcctttgcaagtttcaatgttgggacgtgggcttgaagataaaaaatgggagcttaatttagttaattttcgtaatttcactaccgatgtacatcatcatgttgatgatacgccctatggtggtggcgctgggatggttttgcaaattatgccgattaaaaaagcacttgactcgttaccatccacaggtaaggtaattattactgcaccacaaggtaaaacttttaatgaaaaaatagcgcaaagctgggccaaagaagatgaattaacctttatttgcggacattacgagggctttgatcagcgggtttatgacttggctgacgaaactgtttcaatcggtgattatgttttaactggtggtgaattgccaacaatgagtatgattgatgctacagtaagacttttacctggtattttgggcaatgcagctagtccagttgaagaaagcttttcacatgggttgttagaatatccgcaatatacgcgtccagcagattttgaagggcaaaaggtgccagagatattgactagtggcaatcatcaaaaaattgcacaatggcggcataaagaggctcttagaacaacatatttgcatcgacctgatttgctcaaagaacgagttttaacaactgaagaaaagaaaatgttggcagatattaaagcagagcttgattaagcaagctctacttgatatactattcatcgtggcgtgaccacaatgaataagtttaggggtgttccgctggcgttggtacgttgatgaatgccgaagaaggagaaaagtatattatggatccattaattcaagaattaactaaagaacaacttcgtgacgatattcctgcattccgtgcaggtgacactgttactgttcatgtacgtgttgttgaaggtactcacgaacgtattcagttgttcgaaggcgttgtaatcaagaagaagggtactggcatcggtgctacttacacagttcgtaagattgcttcaggtgttggtgttgaaagaaccttcccagttaacgacccacgtgttgctaaggttgaagttaagcgtcatggtcgtgtacgtcgtgctaagctttactacttacgtgaacgtcacggcaagtcagcaagaattgctgaagcacgtcgttaatcataacgtcaatcataaaaaaggtcagttccagtggaactggctttttttctacccaaaagttgtatataaaatgctatgatggagttatggaatgaatgaggtgaaataaatgaagttcaattgcaaatttgcacttgtggcagcaaccgtattgacagtagcacctatattatcttttcccaatatcacgactacggtacaagcaacgacgaagaaagcccaagcagctaagaatacaatccaggtaaataaagcaccaataatttatgatcgtgcaggtaattataattcgaaatatcatcaaaatatcaaagctggtactcatttaaaatatagtggcaagacttatattattcagcagcgctttgcagctgggattcctgtgccaactagtcgaattattggtggtaagctttactattcgattggtaaaggaggctatgttaaagaaagcgatgtgttaacctggcttggtaacacaaatacggtcaagttacattttcggcacaagaaaaattatatttatgataaaaatggtaaaaaattagttagctataatggtggcaagaattattttactaataaacaaaaaccaaaaattgaggtaccatactataattcgcctaagcaattatttaatattggtaagggcggttatattgatgccagccaagtaactactttgaatggcaagggaaccgtgtttttaaataataatgcacctatttatgatgcaacaggcaagcaattcaagaataaaaatctaaagcaaggcacggttttaaactattatggtaaacctaagaaagcggctgctaatactcaattttattattatcaaaataaaactaagatgactttacctgcaattcaacaaggtgatcatacttattttcagattagtaaaacacaatatatcaatgcggcagacgttgctttagtagatggtaagacgttgtgggataaaggacctgtgagtgtttctttaataaatgatgcatatgcgtatactgccaaatttaagcaaaataaaaaggtgctttatcgtgctggcgctaaactaacggttgatagaaccaaaatagaaggtgaaaaatcacctcaactttatttacatgttaaaggtaccaaaaactatctttatttgggtaatgaaaaagactatggcgcatcaccattagattatcgtcacggttcaactaatttaatattgcagacactgttgcataattagtctgtgtgtaatacttttaaactgatatcataaaggactattatcttaatagaaggtgatagccttttattttaaaaagatcacaatgataaaatggctgtatagtagtaatgatgaaaaaagattgtgaagaaattcaaccgtgaaacggttgtgaaactaagacaaaaatcacaaagctggcagatatctattactaatcttgatataaaggcatttgttattgtgaagctatttttgtaaaaaataatattaaatgtggaattagcgttagaaataatagttatccacatttgtaaatgtccccagtaaagtcgagtaaaacaaaaatttaaaagaagatggaaaaatggattatccgaaaaaactgattgacgaagtgaaagaacgatctaaaggcatgcagctagaaggaattaattctggctcgggtccccaacatcctttattaatgattgtcggtgaagctcctggtcgaaatgaaattgttaataatattccctttagcggggatgcgggtaaggaattggataaatcattgaagcagattggtctgacacgtgatcaggtatatattacatctgctgtgagaagtcgaccttttgcaatcaaaaaggtttttagcaagcgtgaaaataaagaagtaatcaaatatcccaatcgtaagccaaccaaaaaagagattctagctcatgcgcatttcttagattttgaaattgactatgctcaaccaaaactaattgttgccttgggtaatacgggattagaacgtcttttggggtctggtcataagatttcagctgaacatggtcaagtaattaaaaatacaccaattttacgtttaaatgaaactaaagacggctatatttggtcaaaagaaagatacactattttcccagaatatcatcctgccgctgttttttataatcgcaagctaacagatgatattattaaagattgggataaaatcaagccgtatgtagaaaaggaaaaatctgaaaatgagtaatgaaacttttttgattccaattagacaaaataatgatttatcggatatcgctttaaatgaattacgcatggatctagatgagcatgctttacatcaacgttattacactgatattgcttatttagcaggaaatagtcgtaagtatagtctaaatagtgtacaaaccgttgcgagtcctttgataggtaagaaaattttatttttgggttcttctgttacttttggttttggcgctttgggtgaaagctttgttgattatctttggaagcgtgatggcgttgctgcaattaaagatgcagaaaatggtacgaccttagttgatgaagatacttataagccaaacgattcttatgttgctcgttttagagaagagctgaccgaatcacaacctgatgtttttgtcttacaactttcaactaatgatgcaaatcaaaataaaaaactaggcaaaattactaatcaaaactttgacaccaaaaccattacgggagctttggaatatatgatttcaacggctcaagcaaggtggaaatgtccaattttaatttatactaatccttattttgctaatccgttatacaaacagatggttgaacgagtacacgaactggctcaaaagtgtcacgttgagattctagatttatacgatcatcctgattttcagcatcaagacgctttgtatatggctgatgaaattcatccaactcgtgcgggttatctaaagaaatggttaccattatttgaagaaaaaataactgaaattttggcataaagaaagacctagataaattatctaggtcaaaattgaaattagtcaatgttattacgatacaagctaactaccttacccaaaattgtaactttaggtaaaatgattggagccattgtatcattttctggctgtaatcggtagtgatccttttctttgtagaaacgcttaactgtagcttcattttcttcagtcattgccaccacgatttcaccattgttggcagatgattgtttgcgtacgattacgctatcaccgtttaaaatgccagcgttaatcatactttcaccgtggactttgagcataaagagttcaccagcatcactttttaagtctggtgggagtggaaagtagtcatcaatatcttcaactgccagaattggttgtcctgcagtaaccacaccgataactggaatttcctttggcttgatacctaactcttttttaccttcacgggtaatttccaaagcacgaggttttgtagcgtcttttactagccagccctttctttcaaggcgagctaaatgaccatggacagtggaagtagaagaaagaccaactgcagaacagatttctctaactgtaggtggaatgctccgtttctcaactgtatcgtaaatatattgcaaaatttctagttgctttttatcgcttgtttttcttggcatttttaattctccgtttgtatttatggtacttaatattataacctaattctaccagataatgtcaatattatcaaacaggcgttcttaagaagttatactttttttatgacataaaatagggtagactaatgagtgttaatgtgaggtggaattattatggataataaagatgcaatgagcaaagaagaagaaaaaaaggtaactgatcgaatcaacgaactttaccataagaaagaaaaggaaggcttaactccagaggaagaagctgaaagaaaagaactacataagaaatttttagctaactttagagctgcctttaagcaagatgttgaaaacatggtcatcttagacaagaatggcaaggaagttacctcagaacgtgccaagcgagcacaaagaagaaaaggacttagaaaagattaattagttctttcaaaaagttagagaactatgataagatataaatgttagttagatggaggatttaatatgaatttaggtttagcaatttttttaattatcattgcgctcttgattggcgctgtagcaggtttttacggtgcaagagcttacatgaagaagtactttaaggaaaatcctcctattagtgaagatatgatcgttgctatgatgtcccaaatgggtcaaaagccttcaaataagaaggtacatcaagtaatgaacatgatgaagcaccaacaaaagtaattaatttaattagttttgttagaaaaggcgaaggatttccttcgtcttttttgtgcacttttaagaatgaggtgaaatatgggaatatttagtaagttagggtggttttttaaggctgagaaaaaacgttatatcataggcattacctttttggcgttaacttctttagctaacttggtaccgccccgtgtattaggcttaatggccgatcaattggatcaaggtcacatctcttggggacaatatggaatgttgatcattgctgtcgtggccgctgcattcacactttatattttgcgctatttttggcgtaaacaaatttggggcggcgcagcagaattagagcgccaaatgcgttcaaagttatttgatcattttatggtgatggatcggactttttatcagcgtcatcgaaccggagatttaatggctcatgctactaatgacgtttctgccattcagaacgttgctggtgatggcgttttaacattggttgattctttagttatgggactttcaacaatgattgccatgatcatttttgttgattggcgtttaactattgtagctttattaccattaccgtttttggcattgggagcttggaaattaggtgatcacttacatgatgcttttgataagtcacaggctgcattctctaagctgaataataaaactcaggaatctgtatctgggattaaggtgctcaaaacttttggtcaagggaaagaagatactgctgcttttgacaagatggtcgatgaaacgatcaatattaataaaaaagtttttgtctgggattccttatttgatccactgggaacaataattatcggtactacgtatgtgatcacgattatttatgggggactattagtaactaacaagattttatcaattggccagttggtttcttttatcgcgtatatttctaacatggtttggccaatgtttgctattggttatttgtttaatattctagagcgtggtagtgcaagttatgaccgtgtagaaaagttacttgatgaaaggcctttgattactgatgcacatgcagatccaaatattacttctcaagatttgcaaggtgaattaaaatatgacattaaatcatttgcatatccagatgagccagatattccagttttaaagcaagtcaatttcactttaaaacctgggcaaactttagggttagttggtcgagttggtgcgggtaaaaccacaattattcaactgcttttgcgagaatttgatcagtatgatggtcaaattactctgaatggaaaagatattagaaatattcaactaaaggtattactcagtcagatctcctacgttcctcaaaataatttcttgttttcaactagtatcggcaaaaatattgctttctcttctgaaaatgtagataaggatgatattgcagctgcagccaagaagagtgatttgcatgatgatgttttgcaaatgcctaaaggctatgaaactttagttggcgaaaatggcttatctctttctggtggtcaaagacagagaatgtcaattgctcgggcattgctaaaagatagtcagattttgattttagatgatgcattgtcagcagttgacgcaaagaccgaaactgagattttgtcatcattaagaaaagagagagctgataaaactacaatgatcgcggctcaccgtttgacttccgtgatggatgctgatttgattttggttctaaaggatggtcaaatcgttgaacgtggtaatcatcaacaactattagctgcagatggatggtatgcggaaatgtggcgtagacaggaattacaagcgaaagtaggtgaagatacagatgaataataacgaagaacagcatgaatctgtttggtctaaggcgataccatttaaagagcaagttgatatttttaagcgtttaatgggctttgttaagcaatttaaatttgaaatgattgttgctttagttggtgcatttattgttagtgtaattaatattcttttgccacgtggcttgcaatatttcttagatcactttctattgcatcaaagcacaacagtgcaggtgattttgtttgcaggttttctttatgctttaggctcaattttaaaggcaataattcagtttacttaccaatatttctttgctttaggatcagaaaaaacgctagagagtgtcagaagggcattgtaccgcaaactgcataagctagggatgcgctattttgatcaaactcctgcgggctcaattgtttctagagttactaatgatacgatgactttgagtaattttttgacggtgctatcaacttttgtgattggtgctttttcggtgattactgcgttagtagcgatgtttactactaatatagttgctgggtggttgattttactctttattccgattttattattagttgtttggctttattcgcaaaaaagctcacgtctttatcgtaattatcgtgagcgtcttagtcgaattaacgctaacttaaatgaatcaattgaaggagtatcggttatccaagaatttaatcaagaaaaacggatgactaataattttgaaggcgaaaatggtggtttaatgaatacacgcttcaacatgatccgagtaaattcattgttattatcgccattgacatcgctgctttattcgttagctttagccatttcattaatgtactttggttttccattacgtgaaacttttgttccagctggtgtagtctatgccttttcacaatacatttcgcaactttttaatcctatttcaactgtgatggatcaaatgacctttttccaagatgggattgttgcaggaaagcggatttttcggattcttgatgatacccaatatgaaccacagcaggatgctcaaaaaggattgacgattactaaaggaaaaattgagtttaaacatgtaagcttttcttatgatggcaagcatgaaattttacatgatatttctttcgtagttaatccaggtgaaactttaggaattgttggtcatactgggtcagggaagagctcgattattaacgtgatgatgcgtttttacgaattcggtcaaggtgaaatcttgattgatgacgttaatattcgtaaatatcctaaagaagaattaagaaaaaaacttggcttggtattgcaagaaccgtttatgttttatggagatatttcatctaacattcgtttgtataataatcaaattactgataatcagattaaagacgccgctaaggcagtccaagcggatcgctttattgaaagaatgccgggtaagtatcatgctaaagtgattgaaggcggagaagaatttagtcagggacaaagacagttaatttctttcgctcgaactttagtcacagatcctaagattttggttttagatgaggcaacagcaaatgttgataccgagactgaaactttgattcagcaaggactaaagcggctgagaaagggtcgaacgacattagctattgctcaccgtctttctacgattgccgatgcggatcaaattattgttttagacaagggacgcataattgaacggggtacgcatgatcaattgcttgcacaaaagggttattactataatttgtataccttgcaaaataatgaaaataaaaactaattgtttttcaggacgtttgtgtagtagcaacgtctttttttgatataatagttaaaaagtattaaataattatgaatatttataaggagcaaaaatgaaaagatattttacagttcgtggtggagctggcgacgtttctaagccagacttaaatgctaagccacaagataacttatacttggctgttaactcagaatggctatctaaagcagaaattcctgctgataagacatctgctggtgtcaattcagagcttgaccaaaaaatcgaagatcgagtaatgaaagactttgcggacattgcggcgggcaaagaaaagatgcctgagattaaagactttgataaggcagttattttgtataagattgcaaaagattttgctaagagggatgcagaaaaagctaatcctattcaaaaggatttacaaaaattaatatccttaaataattttaatgattttaaacaaaaagctgccgatttgtttatgggaccatatgctttaccgtttgtatttgacgtcgatgccgatatgaagaacactgatgtaaacgtactccattttggtggcccaagcacattcttaccagatactacgacgtatcaaactgctgatgctaagcaacttttggatactcttcaagaccaaagtattaacttactgacaatgtccggtattggtaaaagcgaagcacgagtttatgttgaaagcgctttggcctttgatcaaaaattagctaaggtagttaagtcaactgaggaatggtcagattatgccgcaatttataatccagtaacatatgctgactttattaaaaaatttaaatcatttgacatggctgatttcatggattctattttaccggttaagccagatcgaattatcgttatggaaccacgttttctcaatcatgctgaagaattattgaatgaagggaattttgctgagattaaaggatggatgctagttaaatacattaacagcgtagctaaattattgtcacaagattttcgtgaagctgcgtttccttttggtcaagcagttactggtacgccacaattgccatcacaaattaagcaagcttatcgtttggctaatggtgcttttgatgaagtagttggtatcttttatggacaaaaatattttggggcaaaagccaaaaaagatgttgaagacatgatccaacggatgcttaaggtatatgaagaaagaattaatgctaataaatggctttctgctgaaaccaaaaagaaagctgtgattaagttaaaggcgttggttttaaaaattggttacccagacaagatcgaagaaatctttgacttattacaagttgatccgaaaaagagcttgtatgaaaatgaagcggcaatgtcaactgtacgaacgaaatatatgcttaataagttaactaagccagttgaccgttcagtttggctaatgccaggtaatttgaataatgcgtgctatgatccgcaaagaaatgacttaacctttccagctggaattttacaggcaccattttatgacattaatcaatctcgtggtgcaaattatggtggaattggtgcaactattgggcatgaagtatcacatgcatttgataatagtggagcaaaattcgacgaacatggaaatatgaacaattggtggactgacaaagattttgctgagtttaataaacgagttggtcaaatggttgatatttttgatggcttacaatatggtcctgctaagattaatggtaagcaggttgttggtgaaaatattgctgatctagctggccttgcttgtgtagttcaaactggggaaaatgatggggcggatttgaaagatttgtttgagaattatgctcgtagctggatgcagaaacaacgccctgaggcaattaagactgaagttcaaacggatgtccatgcgccacaaccaacgagagtaaacattccggttcaatgtcaaaatgcattctatgatgtatttaacgttaagccaactgatggcatgtggcttgatccagaagaacggattactatttggtaaaattgaataaaaaaatagtcactggatttcaatttctagtgactatttttgatatgtaattatttatcaagcatatatttacgagtcatcggtaaagttttacctgatggtccctttgtcaataggtattggataacgtcgatgttaccagactcgaaactagcagcacaagcattaaggtacatatcccacattctacagaatctttcaccaaatttcttttctacttcaggacgaacggcattaaagttcttatcccaaatttccaaggttctttgataatgacgacgaagagtttccatatcagtaatttgtaggcctgaatcgatgatgtcagtaacaatttctggtaagcctggtaagtagccaccagggaaaatatacttgtttaaccaagcattagtggcaccaccttgttgacgggtaataccatggattaatgcaacaccgtctttgttaaggtacttgtagacatcagcaaagtatttaggtaagttttctttaccaacatgttcaaacattcccactgaagtaatgtaatcccatttttgatcaccaagttcacggtggtcttgtaatctaacttttgcgacatcttgtaagttatcgtcgtagattcgcttttgaactaatttaaattgctcctcacttaaggtaacaccggtgacttttaaaccgtattccttagctgcagtaagcatcagagttccccagccacatccgatatcaagtagggtcttgcctttttgtgggtggagtttgtttaagatatgatgtacttttgcaatttgagcttgttcaagatcatctttattgccatcttcgaagtgggcgcaggaataggtcattgttgggtcaagccacatcttgtagaaatcattaccaatgtcgtagtggctttgaatatcttcttcgctttgcttttccgtgtgtttttgcttaggcataaacttacggaacttagaagcacgcatgaatgaatcagcactttcataagcaccaacaagcaatttttggatattaccatgaatttcgatttttttatccatgaatccttcgcccaaagctagagaagcatttcgagtgatttcactcattggaatcttttcattaaaaacaatttcaatttcaggatcaccattgccataaacttcgctcttaccgtcccagtaggttaccttaacagaaaaggggaaagatttactaagcatcattttgtaaaaagttttttctaacaattgctttttcctccaatatttaaaacctaaaaattattttaacacttatattaaattgcacaggtaaagaaaaatcagtataaagcaatatttgttttatactgatttttacttatttagcaacgtagtggaaatttggatccatttccttatctaatttgttccaagcatcttcaagttgttgaaataaaatttgttcattttcatgggttagtttagttttacgatcaatggtaattggatcaccaaagttaacttctaatggcttgcgcttaagcagtcctttaaaagttaaagggccttggtagacaacaggtaccattggtttttttgacattttggaaattaataaaactccaccttttaattcagctgaatgtcgcgtgcctgaaggaaagataattaatgataactttccttctctaagtcccttaactggaatctttaaggctgatggtccagggttatttcgatcgactgggaaagcgtgagcatgatcaagaataaatcgtaaaaccggatttttgaataattcaattttagccataaacatgaattccattggactagcacctagtgcaaaaagcagtggttcccaccatgtacggtggggggctactaaaatataattgccctgaggcaagcgatccttatgatgaatgtgtagatgaccgtttaacacccaaacgatgaaacggacaatcggacgtataattttgtaaaacattgtctcctcattgattccttcatttgatgtaagctattataaaaatataatgacgagaaaggcaaatatttttatggtagatctgaaagataatgagcgaattgactacatgtatagcgataatcttcgtattattcaagataaaacggcttttagtttttcaatggatacattatttttagcatattgggctaaagacttgatccgtgataaagataaggttgctgatttatgtgcaggaaattgtgcagctacaatctatatggcttattttaatcgtgcccattatgatgcaattgaaattcaaaacgaagtttattctcaagcagttcgttcagtcaagcttaatgagatggaaaatcgtatttcagtttttcaggataatgtgctaaatgcaggacattttttgcggaaagatagttatgatgtagtaacagttaatccaccatattttaaagcacctaagggacatgaagttaatccagatcgtaaaaaagcaattgctcgccatgaacttttgattaatttagagcaaataattgaagtggctagtggcttacttaaaatgaaaggcaaaatgttaatggtacatcggccagagcgcttaggtgagattgcttattattgtatgaagcatgacttaagcatcaaaatggtgcagccatttgtgccacatcgcggtgaagatgctaatttaattattgtagaagccgtcaagcatactggaactgatggaactgttttgaaagatgctgttgaagttcatgaatcaaatggcgacttcactccattagtacagcgaatctcacgagaaactgcagatgacaaagctaaacatgaagcacagggtaaatattacttttatgtcttactgtgtaatgatggcagtttttatggtggttttactaatgatttagaacatcgtttgaaaatgcacaatttaggaaaaggagctaagtatactaaaacacggcgtcctgtacggatgatttatcatgaacagtttgacgataagcgtttagctttgaaacgagaatattggtttaaacatcattcacgtgcttggaaggaaaaatttttgcatgagcataatataaagttttaatccttgcatactgtaatcttttcttgtagaatatttgagtatgctgtgtcagcatatgaaacttaaaacacatcaagagcaatcatcatcgtggtgcccagggtagtggttagatgatgaaatgaacgcttgagaggatataaaaccataggaggaatttaaatatggcagacgttgttacaatgaagcaattgcttgaagctggtgtccactttggtcaccaaactagaagatggaacccaaagatggctccttacattttcactcaaagaaatggtatctacatcattgatttgcaaaagactatcaagatgttagatgatgcttacaactttatgaaggctgttgcccaagacggtggcgttttcttatttgtaggtactaagaagcaagctcaagattcaattgctgaagaagcaactcgtgcaggtcaatactacgtaaaccaacgttggttgggtggtactttgactaactggtcaactatgcaaagccgtattaagagattaaagcaattaaagcaaatgtcagaagatggtacttttgatgttcttccaaagaaggaagttgctctcttaactaaggaaatggacaagcttgaaaaattctttggtggtattgaagatatgccaagaattccagatgtattgttcgtagtagaccctaagaaagaaaagattgctgttcacgaagctaacattttgggtatcccagttgtagctatggttgataccaacactgatccagacccaatcgacgtagttattccatcaaacgatgacgctattcgtgctattcgtttgattgctggtgctatggctgatgctgttgttgaaggtcaacaaggtcaagatgatgaatcagttgaagttgacttcaaggaaaatgcagacggttcagaagaaatcgttagcgctgaagaaaacccagaagactagattttactattagttccgtaggaggatctattaatggcacaaattactgcaaaattagttaaagaattacgtgaacgtactggtgctggcgttatggacgctaagaaggcattagtagaagttgacggtgacatggataaggctgttcaataccttcgtgataaaggtatggctaaggcagctaagaaggctgaccgtgttgcagctgaaggtttaactggcgtttacgttaatggtaatgtggcagctattactgaagttaactcagaaactgactttgtttctcaaaacgacaagtttgttaacttggtaaatgaagctactaagactattgctgaaggtaagccagctgatatggaagcagctaaggaattgaagatggctgatggtactactttagaccaatcattcgttaacgcaactgctacaattggtgaaaagattgttttacgtcgttttgctttagaagaaaagaatgacgaccaagaatttggtgcttaccaacacaatggtggccaaattggtgttatcactgttttagaaggtgcagatgctgcaactgctaagcacttggctatgcacatcgctgctatgagccctaaggttatttcaccagacgaattagatgatcaatttatcactgatcaattagctgtgatgaaccacaagattgaccaagacaatgaaagtcgtgcattggtacataagaaaccattacctcaccttgtttacggttcagctaagcaattaactgatgatgttttggctaaggctaaggaagacatcaaggctgaacttaaagaagaaggtaagccagaaaagatttgggacagaattattcctggtaagatgcaacgctttattgatgataatactcaagttgacaagcaatttgcagtgttatcacaagactacattatggacgatagcaagactgttggcgaatttttgaaggaaaaaggcgctaagttagttgctttccaacgttacgaagttggcgaaggtatcgaaaagaagcaagaagacttcgctgctgaagttcgtgaacaaatgaagtagtcattattacataattatcatagaaaggaggagtacaccgtgtgctccttctttttttgtaaaaattttgtagtgttttaagtgttaaaagacattgcggcattagatatggtagaataattaaagctattagaggaggtcattatgagtcaagttaaatataaacgtgtcattttaaaaatatcaggtgaagctttagcaggtgacaagggtacggggattaatcctactgtaattggtcacttagctaaagaaatcaaatcagttcatgatttaggtgttgaaattggtatcgtctgtggtggcggtaacatgtggcgtggtgaaactggcgctaagttgggtatggaacgtgctcaagcagattacatgggtatgttagcaactatcatgaatggtttagctttgcaagatggtcttgaaaaaataggtgttcctactagaatgcaaacttcaattgaaatgagacagattgcggagccttacattagaagaagagctttgcgtcaccttgaaaagggtcgtgtagtcatttttggtggtggtactggtaatccatacttctcaactgatactactgcagcccttcgtgcagctgaaattggtgctgatgtaattttgatggctaaaaacggtgttgacggtgtttactcagctgatccaaagactgatccttcagcaactaagttctcagaattaactcaacttgatttaatttcaaaagacttgaaggtcatggatagaactgcaagttcactttcaatggatactgaaattccattaattgtctttaacgttaatactccaggcaatatcaagaaggttgtattgggtgaaaatattggtactgttattagaggtgataaataatgaataacgaaactattgaaaaagcaaaaactaaaatgacggattctattaaggtttatcaaaagagattagcttctatccgtgcaggtgttgctaacgctgctcttcttgataatgtccaagtagaatactatggggcaccaactccattgactcaaatgtctagtattaccattcctgaaccacgtgtattgcttattactccatatgatcaaaattcattagatgatattgaacatgcattgttggcttcaaacttaggattaactccggcaaatgatggtaaggtaattagattagtaatccctcaactcactggtgaaagaagagaagaaattgccaaagaagttggaaaatttgcggaagaagctaaaattgctgtgagaaatgttcgccgtgatgccatgaatactttgaaaaaagatgaaaagaatggtgatattactgaagacgaacaacgtaacttagaaaagcaagtacaaaaagtaactgatgatgctgctaagcagattgaccaacttgctgatgaaaagcgtaaggaaattactcaaggttaaagatgagtaataaggataatgaattaaatcatttagccattattatggatggtaatggacgttgggcaaaaaagaggcatagacctcgttttgttggccatcgagagggaatggataatgttgagcggattactttagctgctgataaattaggaattaaagttttgacactttatgctttttctactgagaattgggctcgtcctaaagaagaagtagcttacttaatgaacctccctgttcgcttttttgataaatacatgccaacattgatggaaaataatgttaaggtaaatatcatgggctatttggatgaattgcctgaaaagacttatcgcattgttcaacgtgcaatgtcagagacggccaataatacaggcttaattctgaattttgcttttaactacgggtcaagaagagaaattacgtctgctatgcaggagctcggtggaatgattgaagctggttcactaaaaagcgaagaaattactgaaaaaatgatttcagaccatttgatgactaaaaactttggtccatatcaagatccggatttattaattagaacgtccggtgaacagcgaatttctaatttcttattatggcaattagcatattcagaacttgcctttagcgaaaaaaattggccagattttgatgaaaatgatttaaaaaaatttgtagaagattataagcaccgtaaccggcgctttggtaaagtagacgaatcggatagttaaatatgaaacaacgtacaattacggcaattattgccttatgtctttttattccaattgtgctcgcaggtggcctttggatggattggctgactgtattattcgcagcagttggcattagcgaaatctttttaatgaagaaacaaatcttagtttcttttaattttttgttagccttacttgcaactttaacctggacagttccagactcattctttaaagtatttccttcaaatatcactaaattaggtgtgttttatggaattattatgttgttcttgacctggactgttctttcaaagaataaaaccacttttgatgatgtaggtgtatatattttggctgcactttacattggaataggttttcactatatggcagccattagagcatacccacaaaacggtttagcattgctgggttgtgtttttgttgttgtttggtccactgatatcggtgcctacatgattggacgtaagattggaaaacataaattatggccagttattagtcctaataaaacatgggagggctcgatcggtgcagttgtttgtgccttaatttgtagtgccatctatatggcaattcttggcagcttgggtattaactttggtgtatctgaattaacgatgattattctggcctttttcttatcaattgttggtcaaatgggtgatttagttgaatcagcttacaagcgtttctatggtgtgaaagattccggaaagattttgccgggtcatggtggtatcctggatcgctttgatagtatgctgtttgtattgccagtagtggctacaattttaggtattgttcattaggagaattttttattgaagggtatactaatctttatcgtcgtctttggtatattggtatttgtccatgaatttgggcattttatcgtagccaaaaagtcaggtattttggttagagaattctcaattggaatgggtccaaagctttttcaaattagacgtaaccccaccacttataccattcgttggttaccacttggtgggtatgttcgtttagcaggcgctgacgatgaaagcaagctggatcctggtatgacggttgttttacaattgaatgaacaaaatgaagtagtgagaattgatgcttcagaaagcgaaataccaattgaaggaattcccgttcaagtaacaaaggctgatctagtagacgatttaataattaagggttacgaaaatggcgatgaaaatgatccagtaacttatcacgtagctcatgatgcaactattattgaaaaaaacggaactgaattaattattgcgcctcgagatacacaatttaatcaagctaatgtttggcaaaagttggcaactaattttgctggaccttttatgaacattcttcttgggtttgtagtatttttaatctggacatttacagttccaggtccagcaacaactacagttggatcaactcaggctaattcaccagcgcgtgatgcaaaaattgtgactggtgatcagattgtggcaattaatggacaaaagattaataattttgatcaagtgtcacagcagattaatcaaagtaaaggcaaggtcttacactttgaattaaagaaaaatggtcaaattaggaaagttacagttaagccaaaagctcataaaattcaaaaacaaacagtttatcaaattggtattgtagctaagagcaatgagaatgcagttgttaaattaaaacgtggctgggatacagctatttcaactaccggtctgattttcagagccgtaggtaacttatttagccactttagtttgaataaattatcaggtccagttggaatttattctcaaacttcacaagtttcacaaatgggctttacttatgtattagcctttttaggaatgatttcgattaatttgggaattgtcaatttaattccaattcctgggcttgatggtggtaaacttttattgaacttaattgaattagttcgcggtaaaccgatttctgaagaacatgaggcaattgttgaattaattggtttcggcttattattagttttaattattgcagttacaggtaacgatatctatcgctattttattaaataattatattttttactttaggagataagaatgcgtcaatcaaaattttttatgccaactttgaaggaagcaccatcagatgcagtggctgaaagtcataagctgatgattagaggtgggtatattcgtcaagtcacagctggagtttatgcttatcttccattaggctaccgtgttttacgcaaggctgagggaatcattgaacaagaaatggataaaattaatgttccagaaatgattatgcctcatttacttcctgcaactttgtggcaagaaagtggccgttacaagaaatatggtgcagaaatgttcaagttaaaagatcgtcatggacgtgaaagcttgcttggacctacacatgaagaaacttttaccgaaattattgctaagaacttaaagagttacaaacaaatgccacttgctttgtatcaaattcagactaagtttcgtgatgagaatagacctcgttttggccttcttcgtgggcgtgaatttgtaatgcttgatggttacagttttgctgcaactcgtgatcaattggatgaacaatttgatgatcaaaaaaatgcatataagcgtatctttaaacgtgccggtgttactgttcaccctgtaattgctgactcaggtacaatgggaggtaaaaactctactgaatttcaagcccctgctgctatcggtgaggatacaattgctactaatgaaaaaggaacatatgctgccaaccttgaaatggctaagagtattgatactttcaagcaagaaccagaagatgctaagcaattaactaaggtagctacgccaggctgcgatacaattgaaaaattagctaaattcctcgatgtaccagctactagaattgttaaaagtattttatacattgctgatgaccaaaaagttttagtattaatccgtggtgacaagcaaattaatgaggttaagttgggtcatatccttgacgctgatgaggttcatgaagcaaatactgctgatttaaaggaaatcactggtagtgaaaagggtggcgttggtcctgttaatgcagattgggctgataagattattgcagatgaaactgttaagaatctttacaacgttgtagttggtgcaggtgaaaccgattatcaatttgaaaatgctaacttagaccgtgatttcaaggtggatgaatttgctgatattcggactgctaacgaaggtgaaccagatcctgttgatcatttaccgcttaagttcactacttcaattgaagttggtcacattttcaagttgggtacttattacactaagaccatgggtgcagatttcttagatcaaaatggtaaagcaaagcctgtcatcatgggttcatacggtattggcgttactagaatgttatcagcagctgttgaacaacacttaactgaacgtggtgttgcatggccaaaggaaatcgctccatttgcaatacatattgttcaaatgaagatgaataaagaagatcaaactgaattagctgaaaaacttgaaaagaaattcagtgaaaagtatgatgttttatacgatgatcgtaaagagcgtgctggtgttaagtttgctgatgcagatttagtcggtgcaccaattagaattacgattggtaagaaggctgctgatggcattgttgaagttaagcgaccaactgatgacaaagcaaccgaaatgtcaattgatgaattagataagtttgtaaatcaagagttaggataatttttgtggcaaataaaaacgatcttttcttaaaattgctcaaacaggttcaatttcctgatagttttgaagacaatgcgcttctacaaaaagggaaaattgaaaacgtggatgtttacgctaaagaacacaggtgggatatccacgttttttttgatactcccttgatgtatgacacctatgtagcattaagaaaagctgtagaagaaactttttcttcttttgtaaatgtaagattttatgttggaacagctgatggttctgatcaatatttaccagattattggcattatgtagttcaaaattcaaatattttgcaacctgtggctcgtgaatttttggctggccaaaaacctaaaaaagttgatggccgctgggttattccagttgataataatgtgattgatggtttaattgagcagaaggctttagatgatttagctgaaaagatgcgtgattatggcttctttaatttgaaatttataactcagctggatcagacaagttctaaaaacaatttagaaagtttgcaggagttgcaacaagagcatgaaaaaagcatgcaggaagtctttgagaagacgccagacaaacctaaaccgcaacaacctaaacagtatccaactagacgtactaattatggtaaacgtaaattagatgaaaatgctccaattacacaaattaaagagctggaagatggcgtacgtaatgtagtaattgagggaaatatttttaatgttgaaactcgtgagcttaaatctggtgcaatcattttttctggcgaaattacggattatagtgattcaattgcatttaagaaatttgtttctaataaagatgaaattgaagagctatctgcaattaaaccaggaacttgggctaaaatgcaggggtcagttgctgatgatcaatatatacatgatgtagtttttaatattagtagcttagagactgtcgagcatgttgggcgaactgaaaaatacgaaggtgagcctaaacgagttgaactacatgttcatactaatatgagtcaggttgacgcaactaatactccgacggactttattaaaactgctaagaagtttggacaaaaggcaattgcgattaccgatcatggtgatgttcaatcattccctgaagcatatagcagtggtaaagcactggacatgaaaatattgtatggtgtagaagctaatatgattgatgatcatgctttactagttttgaatcctgcaccgatgacctatgaagaccgcgagtttgtaatttttgacgttgaaactacggggttgtcatctgtttacgacacaattatcgagattggtgcggttaagatgaagaacggagaagtgcttgaacgctttgataagttcattaatccgcaccatcctttaagtgagcaaactattaatttgacttcaattacagatgaaatggttggcgcagccgatgatgaagcagttgtcattaagcaattccaagacttttatggcgatcgaccactgtgtggacataacgttcaatttgatgttgggtttgttaatgcagcattaagacgtgcagggctaaaagaaattactcagccagtagttgatacacttgaagtatcgcgtttactacatccagagcagagtcgccatactttagattcattagctaagaagtataatgtttccttggaacaccatcaccgggcaaatcaggatgctgaagcaactggctatttaatgtttaaattgttagatgcttttaataaaaagtatcatgaaaataatttgaataatttgaatggctatgcagcacatggtgaagtttataaacgagcccgtccttcccatatgacagttttggcaaaggatcaagctggattaaagaatctttacaaattagtatcaattgccagcacgaaggactttttccgtattcctcgtacgccgaagtcagatttggctcgtttgcatgatggtttactttatggttctggttgttggcaaggcgatgtctttatcgcaatgatgcaaaaaggttacgacgaagcaagagaaaaagctaaattttatgattatcttgaagttcaacctccagcaacctattcgcaattaattgctgatggtttgattaaggatgaagatcaattacatgaaattattgaaaatattattaaattagggaaggaattaaataagcctgtagttgcaactagcgatgcccactacgttgaccaaaaggacgctatttatcgtaaaatcttgattgcggctcagagatcaaaccctagtcgaaataagccacagccagatttgcatttctattcaacacaggaaatgctagatgcattttcattcttaggcgaagatgtggctaagaaaattgttattgacaataccaataaaattgctgatgaattgtcagaaattcagccaattaaagatgggttatacccaccacatattgaacatgccgatgaagaaatgaagaagttgacctatgataaggcttatgaattatatggtaagccattaccgaagattgttaaggatcgaatagatttggaattaaattccattatttcgaatggttatgcggttatttacttgatttctcagcgtttagtagctaagtcaaataaagatggctatttggtaggttctcgtggttctgttggctctagtctagtagcaacgatgtcaggaattactgaagttaatccgttagctccacactatcgttgtcctaactgtaagtattcacaattctttgaaaatggggaatatggttctggttttgacttgcctgataaagattgtccaaaatgtggaactccattagttaaagatggacaagatatcccatttgcgactttcttaggatttcacggcgataaggttcctgatatcgatttgaacttctcaggtgactatcaaccagtagcccataattttattcgagtaatgtttggaccagataattcatatcgtgctggaacgattgcgactgttgcggataagactgcttacggttatgctaaacactacgatgaagagcatgatttaaagctaagaaatgcggaattagaccgtttggcagctggtgtccgtggtgtcaaaagaactactggtcaacaccctgcaggaattgttgtagtgcccgatgatatggacatttacgattttacgccggtatcgtatccagccgatgatgtaaatgccgcttggttgattactcactatgacttccactctattcatgataatattttgaagtttgatattctgggacatgatgatccaactatgattcgtcacttgcaggatttgtctgggattgatccattgactattccacccgatgaccctggagtcatgtcattattttctagtcctgatattttaggtgttactccagagcagattcaatcagaaactggaactttgggtgttccagaatttggtacccgttttgttagaggaatgcttgaggagactaagccaacgacattttctgaattattacagatttcaggtttgtcccatgggactgatgtatggctaggaaatgctgaggacttaatcaatcaaggaatttgcaaactgaaaaatgtaattggttgtcgtgacaacatcatgatggacttaattcactggggcgttaagccagaagttgccttttcaacaatggaatccgttcgtcatggtcgtggcatcagcgatgaaaatatggctattttaaagaaaaataagaatattccagattggtatattccttcttgtctgaagatcaagtacatgttccctaaggctcacgctacggcttacattttaatggctctacgaattgcttggtttaaagtatattatcctgaaatctattacacagcttacttttcagttcgtgccgatctatttgatttggttgcaatgagtcatggtaagaatactgttaaggctgcaatgaaggaaattcaggataaaggaaacgatgcatcagctaaggataagagtttgatgaccgtgctagaaatagctaatgaatgtctagaacgagggattaagatcaaaatggttgatattgatcaatctgaagcaactgactttaagatcttagataagcatacaattttagcaccgttcaatgctgttcctggtttgggggataatgcagctaagcagattgtagctgctcgtgcagaaaagaagtttttgtctaaagaagatttagctaagcgcggtaaagtatcacaaacaattatgaattatttcgaagaaaatggtgtcttggaagggatgccagatgaaaatcaattatcacttttctgatagttaaattttacaagatcaggtaaaacatggtatactacgtatgaagttcgaataggtaaattcgagtgagcagtgatgctcactctttttattacggaggaaaatttttgtctaaagttatagattctgttcgtccagttgtcgaaacaattattgatgaacatggtgacatgttggttgatatggaatacgttaaagaaaaagggcaaaattatttacgcatttatgttgatcgccaaccaaacggtattgacattgatgagattgcagctttaagtgaacttgtttccgaaaagctggatgctcttgatcccgatccacttccagatccctatgttttggaattatcatctccaggggcagaacgaccaatcaaaacaaaagctgattgggaaaaagctctgaatgattacattcatgtcggtctttatcaaaagattgagaataaaaaaatgtatgaaggtacactcaagtcttataatgatgacgaagttgtattagaaataaaagataagacaagacgaaaaacattaactgttccccgtaagttaattgcaaatattcgttttgcaattgaattttagaaaggttgatcaaaaacttatgtctaaagaaatgctagaagcgtttgctactttggaaaataccaagggcattaagcaagatattattgttgatgcaattaaagccgctttggtagctgcatacaaaaagaattataatcaagcacaaaacgttgaagttgattttgatgaaagaaaaggtaacttcaaggtaatggcagttaaaactgttgttgacgaagtgcaagatgaccgtcttgaagttagtttaaaggatgctttaacaattaatcgtgcttatgaagtaggcgacgaaattcgttttgaagtaacacctaaaaattttggtagaattgccgcccaaactgctaagcaagttatcatgcaacgtctacgtgaagccgaaagaaaacatattattgatgaatattcacaatatgaagatgaattggttactggtaccgtggaaagacgcgacaatcgtttcgtttatgtaaagattggtaatgttgaagctgttatgcctcaccgtgatcaaatgccaaatgaggtttacaatccccaagaccagattcgtgtactagtaactcatgttggctccgatagcaagggtgcacaaattacagtctcaagaactgctcctgacatggttaaacgattgtttgaacaagaagttccagaaatttatgatggaaccgttgaaattgtttcaatcgcacgtgaagcaggtgacagaactaagatggctgttaagtcaaatgatcctaacatcgatccggtaggtacctgtgtaggccaaaagggtgctcgtgtacaaaatgtagttaacgaacttggcggtgaaaatattgatatcgttaagtatgaagaagatccatctgactttattgctaatgcattaaatccagcagaagtgattgcggttcaatttggtgatgatgaagaagaaaaaagtgctttagttatcgtaccagattaccagttatcacttgcaattggtaagaaaggtcagaacgttcgcttagctgctcgtttgacaagctataagattgatattcgtcctgaatctgaagtagaatttgtagatgaaaaaacaaatgatacagctgatgctgcagatagtagcgaaacttctgaaaatgttgaaagtacagatgacgctgctgacgttgaaagctcagatgatacaactactgtagaagattcaagtaaagaagataaaactgaagaataggtgattttttgaaaaaaagaaaaatcccaatgcggaaggatttattaaccgatacaatgcagcccaagaaggaattagtacgtattgttatcgataaagaaaaaaatgtgtcagttgatccaacaggtaaaaaggctggtcgcggcgcatatgtttcccttgatccaagtaagattgaagctgctaaagagaagaatgtattagaacgtagtttaggtgcgaaagttccagatactttttacgatgagctttactcttatgttgatcatcaaaaggcaagaaaagaattatttggtgataaataagattgcaaaatagacaaaaagcaattaatttgttaggtttagctgagcgtgctggtaagttaactaccggtacagagacagtcattaatgaacttaataagcacaaaatcaaagcggttattatggctagtgatgttcaagacaacacggcagaaaaagtaaaccgcgctgccagaaaagacaatattcctatgataactatgtttactgccattgaattgtcaaaggcaattggcaaaaaacgcaaagttttaggattaactgatgctggttttgctaaggcgttagttaaaaaaataaatgaaggagtgtgattggatggcaaagaaaagaatttatgaaatcgcaaaagaagtcggcgttgataacaaagttgtagtccaaaaagcaaaggatttaggcttagatgtaaagaatcacatgtcatcagtagatgattcacaggttgcaaagttaaagaatagtttccaaaactccgctcctgctgcaaaatcttctaataaaaagaataaaataaaaatctctgtttcttctattcgcaaaaatgaaaagaagcaagaagataataatagttctaagaattctaagagacgcaataataaacgtcgttcaaataatcacggtcatgagaataaaaatgatcgtagaaataatacaggtaagccaaaggcagctgctttgttacaacaatttaaacaaaagcaacgggcagaagaagggcaacttaatcgtgaagcccaaaaagccagaaaagaatatcatgagcaattaagacatccaaaacaagaacagccagtgaaagataataagaaaacaagcaaccacaaagataacaagaagaaagcagaaccagtagaaaagaaagttattggtcctaagattttaaagccttctccagctcgtttgaagaagcaacagcctgaagcgactaaagaactagttcaagttactattcctgaggctcctaaggaagaaaaacgcggcaataatcgtggtcgcaacatgggaaagccaggacgcaagggtaaaaatcaatttggcaatggtcgtagtgaccattcagatcgttcagagagaaagcggcgtaagaataaaaaacgtcaacaagagcaaaagccaaagaaaacacttactaagcgtaaggaacgtccattaccagaaacattagtttacgaagaaggtatgaacgctcaagatattggtaagttaattcaccgtgaaccagctgaaattgttaagaaactcttcatgcttggcgtgatgactaaccaaaaccaatctttggataaagatacaattgaacttttagctgctgaatatggtatcaatgctgagcaaaaagttcatgaagacatctctgatattgataatatctatgacaagagaatggaagagtcaaaggaatctaaaaaccaggttaaacgcccaccagttgttacaatcatgggacacgttgaccatggtaagaccactttacttgatcgtcttcgtcatactcatgtttcagctcatgaagctggtggtattactcaaaagattggtgcttaccaagttagattagatgatcgcttaattacattcttggatacaccaggacacgcagcattttctaacatgcgtgcacgtggtgctgaaattactgatattgttgtactggttgttgctgcagatgatggtgtaatgccacaaactgtagaagcaattgaccatgcaaagagtgctaatgttccaataattgtagcaattaacaagatggataagccaggtgcaaatccacaacacgtaactgaggaattaatgaaatacaatttgattcctgaagattacggtggtgatactatcttcgttaatatttcagctaagacaggtcaaaatgttgatgacttattacaaatgatcttgttgcaatctgatgtgatggaacttaaggctaatccaactgaaatggcaattggtactgtgattgaagctcgtttgtcacgtggtcgtggacctgtagcagacgttttaatccaacaaggtacacttaatgttggtgacccgattgttgttggtaacacttttggtcgtgttcgtactatgactaatgatcgtggacgtcaagttaagaaggctacaccatcagaacctgttgaaattactggtttgaacgatgtgcctgaatctgctgataagttagttgaatttaaggatgaaaagaccgctagaagtgttggtgaagctagagcacaacaagctttacaaaagtctcgtgaaaatgttcaacacgtaactcttgataacctcttcgatactatgaagaaggaaaacatgaaggaagttgacattgtcttgaaggctgatgttcaaggttctgtagaagctttacaacaatcgcttgaaaagattgaagttgaaggcgtacgtgtaaatatcattcactcaggtgtaggtgccattaatgaatcagatgtaactttggctggtgcatcaaatgcatttattattgggttcaacgttcgtccaactgctactgctaagagccaagctgaaaccgatggcgtagatattcgtctttacagcattatttacaaggctattgatgatgttactgctgccatgaagggtatgcttgaaccaacttatgaagaaaaggttatcggtaatcttactgttcgtgaaacttggaaggtttctaaggttggtacaattgctggttccttcgttgataagggcttggttaagaatgattctaagattagagttattcgtgatggtatcgttaagtatgatggtgaaattgcttcacttaagagatttaaagatgatgttaaggaagttaagcaaggtaacgattgtggtttaacgattaaggactacaacgacattaaagttggcgacgaattcgaagtttacgaaatgcaacaagttgagcctaagtaattactattaggaggaaaacatgaagcatagaattggtcgtgttgaaggtgaaattctacgcgaattaaccaagattttacaaaagaatattcgtgatccgcgcttaagtggtgtaactattaccgcagttgaatgtacgaatgatctttcatatgcaactgtttattacagcctgctaactgaagatgagcataaggaagaagaggttcaggcaggttttgaaaaggcaaaaggcatgatgcgtcatttgcttggtcaaacattaactgtttataaggttcctgaattaatttttaaacgtgataattcagttttgtatggtagtaagattgaccgtttgattgcagaagttaagaaacaagatgctaagcgggaaagcaaataaaaaagagggcgccgtgatggtgccctttttttgttgaaaagaatagggaataattatgttaaacggaattttagttattgataaagataaagggatgactagtgcagatgtagtttatcatttgcgccgcgtattacatattagaaaaataggacatgctggtacgcttgatcctgaggtgacaggcgttttaccaattgctattggtcaggctactaaattaattgaaatgatgcatactaggccaaaagaatatattggcacgggactatttggttatagcacagatagttatgatgcaactggaactgttttaaaagaaaaaaagttgattcagcctttttctggtgcagaaattcaagaaaatatgaataaatttgtaggagaaattgttcaagtgcctccaatttattctgctgttaaagtgaatggtaaacatctttatgaatatgcgcgtgaagagattgaagtcgagcgacctcagagaaaggttgaagtcaaacaatatgatctaactaaagaaccagtttttgatataaatactgggcaagaaagctttgattttaagattaaatgcagcaaaggcacttatgttagatcgttagttaatgatctaggtgaaaaattagattgccccgcaacgatgacttatttgagaagaacagctagttctggctttgatattacacaagcagtaaaattaaaggagattgaagagaatccgaaaaaggccactgaacttatacagccgattgatgcattttttaaggaatacactcaggttgatttaactgaagaaaagtggcttaaagttaaaaatggagcgggtatttcgcttgaaactaatgcgaaaaaagttgcactacgatacaataaaaaggtgaaagcaatttatgaaaaaaaaggaaagctttatcgcccaagcttaatgctgttgcaaaatgaataaatgaaatgaaggaattagctgtgaaaatcgttcatttaacatatcctgttaaggaaaatattttatctactagaattgtgcttgcccttggcttttttgatggggttcatttgggacatcagcgcttaattaatcaggctaaagaaattgcattacagaagaaattgtcattagttgtgttgacctttgatcgacatcctaaggaagtttatgagtcgaaacgagattttaaatacttagaaactttggaagaaaaagctaacaaaatggcggaattaggagtagattatttggctgttttaccatttactaaaaatttcagtcaaatttctgcacaagaatttgtcgataatgtaattgtcagattaaatgctgataccgttgttgctggctttgattacacttatggttctaagaatattgcaaatatggctaatttaccccaattttccaaagggcgttttaatattgtagtgatgccaaagcaaacttttaacggtagaaaaattggctcaactgaaattcgtcaagcaattaaggatggtcagatgaaattagccactgaattaatggggcaccattatgtaatgagtggtatcattgggcatggtaaacgaaatggtcataagctaggctatccaacagctaatttgatttgggcagaacataaggtgattcctaaaattggagtttatgctaccaagactaaagtaaatggtaagtggtataactccatgactagcgttggctataatgtaaccattaatcaggacaagaagatatatattgaatctaatatttttgattttaatgaagatgtctatggtaagccaatgaagatcaaatggtataaatataccagaggtgagaaaaaatttgccggattacctgaactgaaagagcaacttgaacgagatgagcaagaaattagggcttattttaagcaaaagggttaagaagctacgtactttgaaaaaagtgcgtattttttgaataaaattagcaatctacttgatttagtgctaatttctggtatcatattaactgttagcacctgagagatgtgagtgctaaaagtgagggcgatataatatgttgaccgagcgtcaagagcttattttaaaaacaataattacagactttacacaaagtcatgagccagtaggctcaaagaccgtaatgaagcagttgccaattaaagtttcaagtgcaacgattagaaatgaaatggccgtgttggaagagcaggggttaattgaaaaaactcactcttcaagtggtcgaattccttcaagcgagggctatcgttattatcttgataatttagttgagccgttgcaattaccagagtctgtttataatacaataggaagccaattagatcgaccttttcatcaagtaaatgaaattgtacaagaagctgcacgaattctgtcagatttaactaactataccgcatttgcggaaggacctgagagtcatgatgttagagtcacaggatttagaattgtaccgctgtctcaacgacagattatggcaattttggttacaagtgatggtaacattcaaaatcaggtatatgctttgccacataatattcacggcgaagaaattgaaaaggctgtccgcatgattaatgatcagttagtcggaaagagcctaaatgaaatcaacgtttcgttgctaagtgaattagctaaaaacgaattaggcggcgaacatgtgactgaattgcttagtttagttgaagatgtcgtaaaagatgcagctagtgagcagatgtatgtggatggacagattaatttgctcaataatacttctgaacatgatgtaaatgacattcgttctttgtacgagttgattgatcataataatctgttcactaatttaatggatgcaaaggtggatccaaagtctggaaattattcagtaaaggttaagttgggatctgaattacccaatgatttattaaaaaattatagtttgctgacagctgagtacagcgttggctcccatggtaaaggaactattgctttacttgggccaacgaatatgccatattcacaaatgattgggttgcttgaatattttagaaatgaactagctaaaaagttgcttgattattatggcaagtttcaataaaggaggttagccgtgagtaaagaagaatttccaagtgaaaaaaatctagagcaaaaagaaaagacttctgagcctaaggctaaaaaagaagccgataaaggtgaagaaaagaagcaagaaaaaaataaacaagatcaaaaattagctaaagaattagctgatttaaaagataagaacaaggatcttgaagataagtatttgcgtagtgaagcagaaattcaaaatatgcaaaatcgctacactaaagaacgtgctcaattaattaagtacgaatctcaaagcttagcgaaggacattttgccagcaatggacaatttggaaagagccctaagcgttgaggccgatgatgatgtgtctaagcagttaaagaagggcgtgcaaatgaccttggatgcacttgtgaaggcaatgaaagatcacggtgtagttgagattgaggctgatggcgttaaatttgatccgacattacatcaagctgttcaaacagtagcagctgagaatgatgatcaaaaagatcacgttgttcaggttttacaaaaaggatatcaatataaggatagaacactaagaccagcaatggttgtagttgctcaataagagaggaagctaatatatgtcaaaagttattgggattgatcttgggactactaactcagcagttgcagttcttgaaggtaaagaaccaaagattatcactaatccagaaggtaaccggactactccttcagtagttgcatttaaagatggtgaagttcaagtcggtgaggtagcaaagcgtcaagctattaccaaccctaataccattgtttcaattaagcgtcacatgggtgaagctgattataaggttaaagttggtgataaggaatatacaccacaagaaatttcagcatttattttacaatatattaagaaattctcagaagattacttgggtgaagaagttaaggatgctgttattactgttcctgcttacttcaatgatgctcaacgccaagctactaaggacgctggtaagattgctggtttgaatgtgcaaagaattattaacgaaccaactgcttcagcattagccttcggtttaaataaagaccaagatgaaaaagtcttagtatacgaccttggtggtggtacttttgatgtttctgtattgcaattaggtgatggtgtcttccaagtattgtcaactaatggtgatactcatcttggtggtgatgactttgatcaccgtatcatggattggttaattaagaactttaaggatgaaaatggtgttgatttgtcgaaggacaagatggcaatgcaacgcttaaaggatgctgcagaaaaagcaaagaaggacttgtcaggtgtatcaagtactcacatctcacttccattcatttctgctagcgaagctggtccattacaccttgaagcagatttaactcgtgctaagtttgatgaattaactgctgacttggtagaaaagactaaggtaccatttgacaatgcattgaaggatgcaggtcttactgttaatgacattgacaaggttattttaaatggtggttctactcgtattccagctgttcaaaaggcagttaaggaatgggctggtaaggaacctgaccattcaattaaccctgatgaagctgtagctatgggtgcagcaattcaaggtggtgttatctcaggtgatgttaaggatattgttttacttgatgttaccccattgtcacttggtattgagaccatgggtggtgtcttcactaagttaatcgacagaaacactactattccaacttcaaagagtcaaatcttctcaactgcagcagataatcaaccagctgtagatgttcacgtattgcaaggtgaacgtccaatggctgcagacgacaagactcttggccgctttgagttaactgatattccaccagcaccacgtggtgttcctcaaattcaagttaccttcgatatcgataagaacggtattgtaaatgtatctgctaaggatatgggtactggcaaggaacaaaagattactattaagagttcatccggtttatcagatgaagaaattaaacgtatgcaaaaggatgctgaagaacacgctgatgaagataagaagcgtaaggaagaagcagaccttagaaacgaagtagatcaattaatctttactacagataagactttgaaagatactaaggataagctctctgatagcgatcgtaagccagttgaagatgctcttgaagctttgaagaaagcccaaaaggacaacaacttggatgaaatgaaagaaaagaaagatgctttatccaaggctgctcaagacttagctgttaagttgtatcaacaaaatggtggtgctgctggtcaagctggtccacaagcaggtcctcaaggcccacaaggtggtaattcaaataatggcaacaacggtaatgcccaagatggtgaattccacaaagtagatccaaataagtaatgggtttataattaaacaaaaggagaaaagaactacccattgagtagttcttttcttttgagaatacaaggagttcaaatagatggcacaagaagattactataaagtacttggcgtagatcgtgacgccagtgatcaggaaataagtagggcatatcgtaaattagccaaaaaatatcacccagatttaaaccatgaacctggagctgaagaaaagtataagcaggttaacgaagcctatgaggttttgcatgataagcaaaaacgtgcgcaatatgatcaatttggttctgctggtgtaaatggtcaaggtggctttggtggtggagctggtcaaggctttggcggtgccggatttgatacttctggctttggtgattttggcgatatctttggcgatatttttggtcaaggccgtcaacagagggttgatccaactgcaccacaacgtggccaagatttggattatcaattgacaattgattttatggatgccattaagggcaaaaagacccaggtcagctatactcgaagcgaaacttgtgaaacttgtggcggtaatggttgtgaaaaaggtacacatccaattacctgtgataaatgtcatggaactggttatatgacaattactcaacaatcaatgttgggcatgatccgtcgtcaaaccacttgtgacaaatgtcatggtcgtggtgtgattattgagtatccatgtaaaacctgtggcggtaaaggaacagttgaccgtaagaatactattgaagtggatattccagcgggaatcgacaatggtcaacaacttagatatcaaggccaaggcgaagcaggtataaatggcggaccatatggtgatttatatattaactatcgaattaaaccatctaaagattttgagcgtcgtggccagactatttatacagaagtaccaatctcatttgctcaggctactttaggagatgaaattaacgttaagactgtgcatggtgatgtaaagctaactattccagctggtacgcaacctaataagaagtttactttgcgtggacagggtgtgccatatcttcgtggtaatggcaatggtgatcaaattactacagttaatattgttattccaaagcacattaatgataagcaaaagaaagatttgaccaactttgttcatgatggtggtggcaatattacaccacaagaaaaaggattttttgaacgcttaaaagataagtttaatatgtaaatgctaaaaaggtttctgctacttgcaacagaaaccttttttaagatcaattaattttttggtgatttttagagtttttcttggaaaatattcaatgctgaattttcaattattattctaaaaactctgcattttattgaaaatttactatgctacaatttcatcatttattctagctttgctataattaatacatagtaaagggtgaacgattttatggatttaaaaaaattaaaagactatcaaaaacacattcgaaattttgctattgtggcgcatattgaccatggtaaatcgactattgctgacagaatcttagaattaactgatacagttagtcaacgtcagcttaaaaatcagatgttagatgatatgccacttgaacgtcaacgtggtattaccattaaaatgaactcagttgaagtgaaatatcatgctgaagacggtgaagactacattttccacttaatcgatacaccaggacacgttgacttttcatatgaggtatcacgttctctagctgcctgtgaaggtgctttaatggtggttgatgcttctcaaggtgtacaggctcaaactttggctaatacttatttggcaattgatgacgatttggcaatcttgccagtaattaacaagattgacttaccatctgccgatgttcctaagactaaggaagaaattgaagaaatgttaggtttggatgcttcagaagctgccgaagtttcaggtaaaaccggtcaaggtattaaggacatgctggaaaaggtagttaaagatattccagctccgtctggtgatattactgctccattaaaagcattgattttcgactctaaatatgatgattatcgcggagtggtaatgtctgtcaaaattgaagatggatctattaaaccaggcgatcgaattcaaattatgaatactggcaaggaatatgaagtcacagaggttggtgtttctagtcctcatccaattaagaaggatattttaatcgcaggggatgtaggatatattactgctaacattaagtccgttcgagaaacacgtgttggtgacacaattactcaagctgataacccaacggctgaaccacttccaggctatcgtcaaattccaccgatggtttattctgggatgtacccagttgacaaccgtgattatgaagatttgaaggaagctttacaaaaactacagctgaatgatgcagctttagaatttgagcctgaaacttcaacagctttaggctttgggtttcgttgtggcttcttaggcttacttcatatggatgttgtacaggaaagattagagcaagaatttgaccttgatctaatcatgacagcaccatctgttgattatcatgcaattatgaatgatggaacaaccaaggtgattgataatccatctgatttgccagatgctggtgaatataaggaagttcaagaaccttatgtaaaagcggaaattatggtgccaaatgattttgttggtccagtaatggagctttgtcaacgtaagcgtggtgaattcgttaccatggattacttggataagtaccgagttaatgtaatttacaacatgccattagctgaaattatttttgatttctttgatgatttgaaatcttcgactaaaggttatgcttcacttgattatgaaattacgggttatcgtgctactgatttggttaagatcgacattttgcttaacaaggagccaattgatgcattgagttttattgctcacagatcagaagctcaagatcgtgcccgtcaaatgacttcaatgctaaaaaaactaattccacggcaaaactttgaagttgatattcagggcgcaattggagctaaaattatttctcgagctacaattaagccataccgaaaagatgttacctggaaaatccatactggtgatccagatcgtcgggctaagctgcttgaaaaacagaaacgtggtaagaagcgaatgaaagcagttggtagagttgaagtacctcaagatgctttcatggcagtcttgaagatgaacgatgatgacatcaacggtaaataaaaatggctaaaaataaaaaaaatagtgtaagtacaattttacttagagttgctgctatcatattattgcttgttggtattgctttgatatttaacaaacagatcagtgatcaattaattcatcataatcaacaatctactttaagtggaataaatagaaagacaattgaagaaaacaaaaagaaaaaaggaatgtatgattttagtaaagttaagtctttaggcattgcacaagcagcaagatcacaagtgaaaaagacttctggtgcgattggtgcgttagctattcccgatgttaatatgtatttaccgattatgttggggatgagtgatgatgcaatgtcgactggtggcggcacgatgcgagccgaccaagtaatgggtaagggaaattatcctcttgcaggtcactacatgacagcaaaaggtattcttttctcaccacttgaagatgttaaaaaaggtgagttagtttatttaactaatcttaacaaagtatatgtctatcgaatttatatgaaaaagattgttgatccaactgcggtttggctagtcgataatactaagaagaatattgtaactttgattacttgtgctgatggcggtaagaatcgttgggcaattcggggtaatctgattaaaactgaaaaggctaacaacaataatcttaaggtttttaaattaaaataaaaatttacaatctttaatcagatttagatttgcgataaaattataaatagattttgtaataaagacactcaacaatgagtgccttttcgttttgatgagagaacataaggtgtttgataattaatgaaatggcaagaaagaacagctgatgaattagcaccagacttgattgagaaatatcaactaggtcccattgcagccaaactttttgcattgcggggtattaatacagacgaaaaacttgatttttggtttaatgcaacagaagaaaatctggctgatccagcgttaatgcatgacatggataaggcaattaaccgaattaatcaagcaattgatagcggcgaaaagattacaatttatggcgattatgatgctgatggaattactgcaacgactattatgactgaaaccctaagcattttgggcgctgatgttcattattttattcctaatcgcttcaatgatgggtatggtcctaatatggaccgctatcaagatattgtagctgatggaaccagattgattatcactgttgataatggtgttactggggtcgaggaagtcaaatatgctcaagaacataatgttgatgtaatcattacagatcatcatacttttcaagaaaagaaaccggcagcttatgctactgttcattgtaattatcctggccaaaaatatccttttgatgattattgtggtgccggagtagcttacacgatttgtcgtggtctaatgcaggatactatgcctgagctgctagatttggctatgatcggaactattggcgatatggttaaggtgaccggagaggggcatattatcgttaagcgtggtttagaaatgcttaatcagacagatcgtcctggcttgcgcgctctaatcaaaaatgctggtttgactttaggcagtattaatgaaactgatgtcggctttaatattgctcctcgattaaatgctgtaggtcgattagataatgccaacttggcagttgagcttttgctaagtgatgatgaccttgaggcccaaaaaattgcagataagatcgaagaattaaacaataaacggaaagaattaaccaccgaagtctatgacaaatgtatgacgttaattcataaaaatagctggcaaaaacaaaatactttggttttatatgaccctgaatttcacgaaggtgtgttaggtttagtagctaataagatcgttgaaaagacacataaacccacgattgttttgactaaaaatgatgcaggtgaggttaaaggctcaggtaggtcctttgctggtttcaacttgtttgatgctttaaatccgatcaaggatcaatatttaaccaaatttggtggccatgattttgcctgtggtttatcattagaagaaaatcagattgcgccattacgggaaaaatttgaagatgactttcatgttgaaggtggtcttgagactaaaaaatatgacatggaattgcctatgcagggcttaactccgcagacactagcacaaatcaatcaagtaggtccatttgggacaggtgacacgcagccaatctttagtatctctaatccaacaatcactcatttctttaaaatgggtaaagataagaatcatgtcaaatttacggttgctaaaaaaggcggtaacttatcagttattggatttaataaaggctttttgaataataatcttttgccgtttatttctcaaatttttgttcaattatcattaaatacttatcgaaatcaagtttctttacaaggaatcatgaccggactagcttttgcttcaccaaaattggcagtgccaacgccagttgttgacttacgccaagagaaatatgttatgggtttcgcggaccgctacctgttatttgatcaaaaaaatattccgattgttcgcaaccgactacagatcgatgaagacaagatctctttagttaaagattatgatcaaactggtgaaacagttgcattattagatgtgccacgcaatcagattgaattaaatgctgcattggagaaagattatcaacaaatctatttacgctttttgcttgatcaattgcctgttgaacaaattcccgctaaaaattattttggtgctgttttaaaatatatttatagtcaccctacgttaaagccagcagattaccgtacagttgcaccttatttgggactagattatgatagtgtgcttttcattttacgagttttctttgaattaggctttgtaaaattggatgaaggtaaattggtaggagagccttctcctaaaaaacagccgctgacagcttctaaatatttaatgggaacttcttctcagattaaatttgttaatcaactaagaactatgcctagtcaacgtttgattacatatgttaataatttgacaaataaatagataactattctgttttcagtgcttttatcgttaaaatttgttaaaatatactggtcaaaagcgtttgaacacaaacacagagcattttggaggttatgcttcttatggcagttgattttagtaaatatattgcaagtgttaaggattttcctaacaaaggcattgtttttcgcgatattacaccaattttgcaagatggtgaattgtatcgtgccgctactcatgaattagcggaatatgcaaagagtaaaaaagcagatgtaattgttgggcctgaagcacgtggttttattgtaggttgtccagtagctactgagttaggtttaggttttgtacctgcaagaaagccacataagttaccaagagaagttgaacgtgcttcctatgatttggaatatggttcaaacagtttggaaatgcacaaggatgcgattaaacctggacaaagagtggttgtctgtgatgacttgatggctaccgcaggtactttaagagcttctaaagagctaattgaaaaccttggtggtaagttagttggtgccgcattctacatcgaattgccagatttacacggtagagataaattacctgatgttgatatttattcacttgttcaatatcatggtgcttaaaatagaataaataaaaagagggaattaaatcaatttgaactgagacctaaaagttagacacttttaggtctttttctacgtaaagtcaagcataataagaagtttggcttcattttttgtttaaatttcaacttaaacatcttttagtgtcgatttatttttttagttagacacgacaaataagcccagatccatatctgatttttgggcttagcgttataatgtacttgatcaattaattacgactaaagtctttttgattatgtgtggctacgttgtaatcatatggttgatcattgataatcagggcataaatggttctgattagtttatgaattgaagcaatagctatctttttgaaccctttggtttgagaggatagctttttgctttcataataatctgctatatgacacggatttgtcttagctgcattatcaatttgtccaatagctcgataaagcaacttacgtgcgactgcattgccatgtttagtaatacttaaattagagtccatttctcctgactgatatctgcctggatcaattccgataaaagcattgattttattaggattactaaatctgcgtaaatctcctaactctgctaaaactctgacagcagtggtctgtgcaaagcctggaatgctttctaggttttctaaatcatgattaggcaaagacttcgctaacttaaccattcttgcgattaaattttctctttgatcacttaaattaagcaatctgtgtgcataatactgcacttgctcgacttctatgctagagcaagatacaactggataagcttgataagctaattcaattaatttatctgcagtccttagagcgtgtttaaaagcaatcccctttaagctcattaaccagttaataagctgttttttatcttctcttcttactaagtcacaatgaggatatcgcacaactatttgccagtaatttttacctttagcagaagaaaataaattttcaatttcaggaaaagtcgattgtagagcttggtgaagtcgatttttagctattaccaagtcacttgtcagctggtcatagaagcggctcaaagcattaagctgcttataagtttgggattcgctttgattaaccggatggcgataaagtctttgaattaaagctaaatgataagcatcagttttatcggtcttgttgtagcgtagccccatattcatctcttttttggctttaagcggattaataacaacatattcatagccgtagtcttcaagaaaagcctgcagtctgcgtgaataaacaccggtagcttcaaaaataatttgcggatgtttagaaaaagcggttaattcatgaagcaattgaataaaaccaggacgattattagtaatggttagttcatttttgctttcaccaattagttcacaaacagtagaagtagacttgcttacatcaattccaaaagtaacttgcataataaaaacctccaaaacttagtagtaaaacgtatttacttaagaaatcagatctaattttctaaactcgacatctagtgtccacattcttcgaagagactattgaaaacttaagtaaaactgccagtttattatgcgacatcaagtgtctaaagacctcagggcatatcgttttaccactactttaattctacaaaagaataaaaatagtgaatcaattatcccgtcggataactaattcactatttagcttagaatgtttattatttgttaccgattaatttaaattttgaccatggtttaataaagtcgagcaggaataattcgtctgatctaatagaaccgactttgttcatccttgactccttatgaggttcaaggacaatttgtagttcatttttgtaatgaccaaagttgtcgttaccaatgataatatctccgcgttggaattctacattgttgtcgtgtactggattaggaatatctgcataagttacacggggcatggttgaacgaattacatccttagtgatatcaccacgacggaaatgttgaggcgcttctacgatagttttctcaatcttattaacatcagtaacgtagtttacgtgcaacatcaattgatagcgattaactttagataaggcttttaactcggcttcactggcataagcattaccgatgattacatcatcaatcaacccagaagcccagagatgcattgcttgcacatcaattggtaaattacggtcttgctcaagcgttggtaaaccatcttccacgttccaaggtcccatttgacctacttgacttgagacaaaagcggctgaatgaatgccaaactttttgaagcgttcagaacaagcgataaagaagtcgtaaggtaagccagtaccgcgttgaggataaaaattgtgacagccataaataaacggtgtattagcttggtaagaaataatattgttaagatagtcaacattattactcatgttgagttcaatgattagaccatatgggttgtaagaaagcattgcttcaattgcaccatcaaatgttgtgtcaagacggatgcctgctgcaccaatatcagcaaaaaatttcaggtcatcatagctgacacctagttgtttgaagattgcaggattaacatctaaaaaagtttgaaatcccaatttattgccatattcaatgatttttttatacttagctttggtttcttcagggctgccttgtacttcaagcatactcatgaagatacgagaaaagccatatttgtgagctaagtccagatagtgagcgttgccttcaaatttgctgtggcctggataaattgacagacctaaagatctcattgtcataatagtacctcatttttgataattgtctataccaattatatgatattttttattgtaggtctagtccaaagtgaccgagatagtttatattttggtagggtgtctcgctacgtttttaattaaacaggtgttatatttaaagtacagggtatgtgttaagaaggagaaattaagatggataattttgatcaagaatctggtcaacagcaatatgctaatgattcaggattaaatgttttttagcaaaatatatggttatatggccttagcggttttcgtttcagcaattagtgcttatttgacaatgacggtttttgcgggacctatctctgcctttattgcacaacaccaattgtttacggcgttacctttgcttttattgcaggtgcatatagtggacaaaatattgcttcagcatttgtagcttcggcaaccgtctttgtaacaatggcgattttaggaacaattaccaaaaaagatttgagtcgaatagggtcttatgcttctgctgcgttaattgggttgattgtagccatgttagctaatttgtttttacataatccaatcattgactacgttttttcgattattgctgtgattatatttactattttaactgcgtgggatgcacaaagaatgaaagatatttatttacaatatggtgatgatctttcaactaatgggcttgcagttttaggtgctttgcaattatatcttgattttgttaacttgtttttacaatttttggatatttttggtgcaaatgaagataagtaattaaactagtgagactgtaaaatagtttgtgtaaggatgaatgattccttaaatttatttctttaaacattagaaaaaggagttcctttctcgtatgattggtttgaacaaaaaaacacatacagaaagaagaactccttcatgaatgattttaccaaaaatatagcacaagctctattcaatccagacaaaataaatgatttattgcgcaaagagctacaacaggctgttaataacttgttagaagctgaattgactgcctttctgggctatgatccctatgccagaaatggctggaatactggcaactctagaaatggtgcttatttccgcaaagttgatacgcaatttggcccaattgaagtgcaagtgccccgggatcgcaacggtcaatttcatcagcacacgctgcctggctacaagcagcactcggatatcttggaaagcatgattatcaagctttactccaagggcgtgaccaccagggaaatagccgatctaattgaaaagatgtatggcagccattacagtccagctcaggtatcaaatatttccaagcagatgattccaaaggttgaggcttaccacaaacgcaagctaagcgacaagtttttctgcgtctatttggatgcgacataccttcctttgcgccgagaaacatttgagcgtgaagcagtctatattgccattggcatcaagcctaatgggcacaaggaggtcattgactactgcattgcgcctagcgagaacattgaagtctggacagatatgcttcaaaacatgaaatcccgaggcttaaagcaagttgagctttttctttctgatggtgttgttggcatgaaaacagccttggccaggacttatcctaaagctcattttcaacgctgtttggttcatgtcatgcgcaatatctgcgctaaagtacgcgtcgacgatcgtgaaaagatcatgaacgaattcaaacaggtgcatcaacagacaaacaaagaagaagccacagctgtcctgcatgacttctataccaaatggggcaaggtttacagccatgttatcagaagcttgaaagacatagaaccagatctgctggtcttttataactatcccaagcagatcagagcttcaatttattcgactaacatgattgaatcatttaacaatgtgatcaagcgcaaagctaagcctaaggcagagtttccaactgaacagtcgcttgatgcttttattggcattcaggcaatgagctacaatgaccgttatttcaatcgaattcataaaggctttggtcaggttcaggacaccttagaatcctactttgattaaataaataattaaaaaatcaatttacgagaaagaactatttacacaaaagatttgacagtttcaaactagtttctaataaacgtaggaacacttcatatataaacgtatactatataaatatagtgacatattaagggagtgtttttatgaaaagatgcaagaattgggttgtgactattgttgcatttctgatgttagtgggagaaatcagtgttctgcctgcaaatttgcaggggtcgacatcagttgttaatgcagctattcatcacagaaggagaaagcatcaatatcgtgataaaactaagatttataccagtaattacagaattgttgataataaacgatcaaaaatctttcacgtaatgcgcggtcataattatcgaatgaatcgtgaaaatgcagttttcttcaagagtaaagcagcagcacgtgcagcaggatatcgtgaatcaaaaagataaattaaaagacttctaagagttcaaagttcctagaagtcttttaatttataaaatttatggtaataatctacctgtttttcatcacaggttggtaaattaagtcgattattatggcagcaataatcgctacaattacagtaattgctaagttttgaatggaaatctggaccattgcccaaccacaaagagctaagataaaggtcaatagaacatctgcaatttgaacactaccaaccaacttggatgggtaatcttgccaaaagtacttacgagttctagtaatcaaaacaatcaacattgcgctaagaactaggtatacgtaaaccatagtagaaacagcaccgtgactccaaccgtgtgtgtttaagaaccaaacaaacccaataccaattaaagtccaaccagcagctagtgaaaaggcgatcttagcaagcttagccatattccagttttctggcttataagtaatgtgagtcctgtcagttccaatcatcatcgtaaccatattgttcataatggtatagataaccattgcattcaaggccattgggatgtagtcaaagaaaagatagccaaaagttaacagcatcgttaattcagcagttctagcaagcttggttagtgaccaagtagtcattctttggtatacgcgatgtccagcgtctaaaattttaacaattgagcctagaccatcgtctagtaataccattttacccgaacgcttagctacgtcagcagcatttgaaactgcgattcctacttcagcttgttttaatgcaggcgcgtcgttaactccgtcacctgtcatccctacgatatagcctttttcttggaaaagctttaccatcttgagtttatcttctggtaaaacatcagcaataccggccaaatcattaatatcagtattttcattgaaatcgtgaatcgaaattactttaccagttaaatcaacttgttctgccactgcagcagcggtcttttgattgtcaccagttaacataattgggcgaacgccacgtttcttgagttcagccaaagctgctttagagtctgttctaactttatcttgtaagatgaagacaccagctaacttatcgtcaatcaagactgccactgagcgtcctgccttgaaattaattccagaaatttcttcatcggcatgcttatcgatcaaagataattgcttaaatgaaccaagctttacattatgtccagcaacatcagccatagaataaccagtgtcagaagtaaatggagtaaagttttcagcattcatgactggaatgttattttctactaagtattcatcgattgctgtatcgataataccagcattacgtttatcagttgcggctccagctaaagcaagcacgtctttgtcaggcaagtcacttagatcagtccaagcggctacggcagttttgttttccgtaattgttccagtcttatcaagtaaaagcaagttcaagttagctgcgtcctgaattccagttaggtcagaagtcaggactccttctttacttaagcgggttgcttcaaatgagttggataaagcaaaagttgatggcattgctacaggaattgaagcaataaacatcattgccaggaatggcaacatattaataaaggtattgaaattaccgcctttgaagaaggaggcgataataataactaaggttaaaacaccatctagtaagcaaaggtagtagataatcttagtcaaaagttgttgtaagtgaccaggagcagcggaattgttgatcaaattaatcgtcttaccgcttctagaatctttacctgtagcagtaacaacagctaggccatcaccttcaacaactgtagtaccggcaaaggcggtgtcatcaattgctttcttaactggtttagattcacctgtaattgagctttcatcacaagctaagttaccgtcaacaattttaacatctgctgcgagtacgtccccgcgtttaagtgagattaaatcgcctttaactagttgtttagaatcaagtttgatccacttgccatcgcgttcaactgatacagtaggagtcaacttgtgtgaaatattatttaaaactcgtcttgattgctttttcttagatgcaccgttaaatgcagcaaataaaagcatcaacaacacgaataatgattggacccatttgcccaagatacattctagaattaaagcagcttctagaatccaagcggataggttccataacttagacaagaactctttaaagaaattgtattcaggctctggtacttcatttaagctatcttcttttaagcgcttgtctgcttcggcttgagttaagccgtgaaatttatcagacattattttccctccaaatctaccttaataaggtagcacagatattgctatgaataaaatactaaaatacaatataagatattaaatattttaatatcactatcaattgaaataaaaaaaggataaataatatgaatctaaaacagttacgttattttctagttgtagcagaagaaaagcagattacagcagctgctaagcgcttgtatattgcacagccaccattaagctatcaattaaaacaattagagaaagagttgggcgcgcaattatttaaaagaacggcacatggtattgagctaactgatgtgggacaaatttttcaaagctatgccaatgaaattatttctctagctcaaaatgctgaaaaccaagtacataagactatttccggtgaattgggaacgattgcaattggaatggcatcttcctcaacgggcttgataccaatgaattcttttaatgaattacgaaaatattatccggaaatttcttttgatatttatgaagataatacttatggcatcctggataaattagaaaaaaagacaatcgatctaggcattgtacgaacgccttacaaccagacaggtttaaatactaagactttaacaactgaaaaaatgatggctattagtgtagacccagattttcagcaaaaaaaagaattacgcattaaagatctagcagatcagccattgattatttatcgtcgctttgaggatatttttaatcaaacttttgcacatcatgggcttaaaccattttatgcggttaagtgtgatgattcacggacagcaattacttgggccaagagaaaaatgggagtagcgctagtaccagaatcaattgcgacaacttatgcccaagaaaatatgatcgcaattaaacatgctaattggataacacatttgcagctggtttggcgtaaagatcatcaagttacacctttaatgaaaaaaatcattgctgcaatatgataatactgtaacttttacctaattgatccataataaatgtaaacgggtacaataattaatagaaggtggttgaatgtcgagtccgattcatgtttattcagaaattggtaagttaaaaacggtgatgttacatcgaccgggaaaagaactagaaaatctagccccagatattttgcatcgaatgttgattgacgatattccttatctgaagattgcccaagaagaacatgatgcttttgcgcatgtattgaggcagcaggggatcaaagtattatatcttgaggatttattagcagaatctttaacagatgagaaagttcgtcgggcattcttagatcagttactggatgaatcaagtattaaaaaacaggatcctttgcatcaattattgctgaactatctccaagaattgctaactaaggaaatggtaaaaacggtgattgctggaattagaaaaagtgcgattcataattctaccccatctttagcagatttggctgaggacccagattaccctttttatcttgatccaatgccaaatgtatattttactcgagatcaacaggctgcaattggttcagggatgaccattaaccggatgactttcagagctagacgacgtgaatcattatttatggaaacaattttgaaaaatcatcctgatttcaagaacgcaactattccagtttggcgtgaccgttatcatcatggtcgccttgagggcggggatgaactagttctaaataaccatgtgttagctgtaggtatttcacaacgcacttctgcaactgcaattactgacttagctcataatttatttgatcattcaagttatgatacgattttagcgattaagattccgcacaatcatgctatgatgcaccttgatatagtttttacaatgattaattataatcaatttacggttcatccctttattttagataaagccggcaaaattgatatttatgttctacagcccgatgatcacaacggtgtaaaaatcacagaaaagaatgatttggtgcaggttttgaaagaaaacttacatttaagcgaattggatttaattccaactggtggtggtgatccaattgccgcaccacgtgaacaatggaatgacggctcaaataccttggcaattgcaccaggtgaagtcgttacttatgatcgtaattatgtatccaatgatttgctaagaaaacatggcatcatcgttcatgagattcggtctagtgaactctcacgtggtcgtggcggtcctagatgtatgtcgtgtccgttgattcgtgaagatttataagaggcaaaaaatgaaatatttacaaaatgtttttcaaggtagaagttttctcgattgtaaagactatactccagctgaaatttcatatttaattgattttgcattacatttaaaagaacttaaaaaagagcatatcccacatgaatatctgaaaggtaaaaatattgcactactttttgaaaaagcctcaactaggacgcgatctgcttttgtagtagcttgtaatgatttaggtgctcatccagaatatctaggcgcaagcgagatccacttaggtaaaaaagaaagcgtcaaggatacggctaaagtcctaggctcaatgtatgatggaattgaatatcgcggttttgctcaagaagatgtagaagagctggctaaatattctggcgttcctgtttggaagtgggtgatggccgcgataatgttgccgacagtcttttagtttgtggctcaatgttaggtgttaatgtacatattgttacacccaagcctttgtttacacatcctgatgtacaaaaaattgctcaaaattttgcccaagattcaggttcaaaaaatttgatcacagatgatattgctcaaggcgttaaaggagccaatgttgtttataccgatgttggggtttcgatgggtgaaaatgattggtctgaacgaattaaattattaaagccatatacggtcacaatgaaaatgatgcaaatgactggtacaccagatgaccaattgatctttatgcattgtttgacagcttttcatgatcgaacaactcaggtgggagaagaaatctatgaaaaatatggcttaaatgagatggaagtaactgatgaggtctttaattcaaagtatgcttggcaatttacagaagctgaaaatcgattgcattcaattaaagcagtgatggcggctactttaggaaatttatttattccgattgcctgtggcggtggtggcatccttgttattgtgaaagatgggcatctcagaggtgttgccggcgtaattcataaagatttttccgctgctaaaatggcagaagatatcaacgctgatgaattagtaattctaacaacggtggatcatgcatttttgaattatggcaaagaaaatcaacaagcaattggtaaaataaaagttgaacagctcaaacaatatctagcagcaggttatttcgcagctgggagtatgaagcctaagatagaagctgcaattgaatttgtagaaaaaacaggtaatttagcaattatcacctctttgagcaatgccaacaaactagcagacggagtcggcacaatcatttataattaactgggtgataaaaatgaatatttttaatgaaggaaaaaagcaggatattgcccaagttttagcagctaaagataggcgagtagctgtacaacataagatttttaataagtatcctaatcaaactctagtcgacattaatatgaatatcccaggaccaatcaagaataatcgctatttaactaaaatgtttatgttgggtatcaatgagctggaaaatgcttggactaacctaggttatcattttaaattggtgacacagcttaatgatgatagtggctgtgaaaacttttatgtattatctttgtcaattgaaaaagtaaagcgctcaacaattgattttgagaatcagatatcattgggacgtctctttgatgcagacgtgttggtaaaaaataaacaagctgcaatttcacgcagagatttgggcaggcagccacgtaagtgctttttatgtgatcgccctgctaaagaatgtgctcgtagccggagacattcagtggaacagatgcaggcatttatctctcagctttatcaagaatacgttgcgtaaaataaaccgggattttatgattccggtttatttttatgaaaaatctagttaaaaatttaaaaaatgaactaaaatagtaatgaataaatttatagatgtacgtataggaataagcatggaattaaagaaaaataagaataatttaaagcaaattacggcattaattcaatatgcatttttgaaaaataatgatttgactaaagacgaaaattttatgagtcgttatgatcatagtacaggttatggctattttgataaggaaaaattagctagctatattatggttaatcgatttaaaagtgatgtttttgggcatcatttaccgatggctggaataggttatgtagcttcatatcctgagtatcgtggccaaggtcatatttcccaattaatgaaagaaattttgcatgacttacataggcaagatattccgtttgctaacctggcaccattttcggagagcttttatcgccagtacgggtttagcaatagtatttatcaaaaagaatatcgctttgatggaagcgcattgcgtagttttaaattaccacgttctggtcatatagtgcgtggcaagtgggacaatttagctgttcaaaatggtgtgattcaactttatgaacgtcaactgcatactgatgatgaacgtaacacggttgtacgtgaggcatggtggtggaatagacttgattcttattatcatcaccgcaatgtagccgtttattttgacgcggatgagcggccaattagttacttgatttatcgcattagagacaatacttttttagctgatgaaatgtacgcaattacgccgcagggattactgagtatgtttggttttatgggttcgcacgcgggcagtgttaagcaatttaaaatgagcgtaccagagaaatcgttacgagctgaactttttcctgaacaaaacgaactccaagttgatttgcgtccttatatgatgagtcgaattattgattttgaaaaagttttggcttgtatgcggccaatgcaagaaggtgattttaatctggaagtcaatagcgatgaacagtgtccttggaatattggagtttggcaattaagtaatcatggacgtaaggtagcggtagaacgtaaggaagatgcattggttgatttttcgggatcaattaccgcgtggacccaggtgctattaggtagactaaccatgaatgctgctgttaaactaggattaattacagattaccgcatcaaaaaattagatttcgttaaaggcgatgtatcattttatgattatttttagttgtgaggttaaaaaatgagtaaagaaaagaaactcaatttaataaaattatttggcattgtagttagtggtttgaatttgatcttttttgccttgatggcacttaataagcatgaagatactaaggataaaagaagagtagcagaagaaggacacgcaccgctggatgaaaaataaaatgacggaattaaagattgcatattttgaccaattaggtcgtaaggaattagatcaggcagtgcagcattttgtgttaaaacatcctaatgtagatgtaaaactacttgcgactagtcatgatggtgcttttgcaaaactgaatgaagatgaagcagacatagcaatcaatgatttgcgtgacgagaatcttaactttgatgaaacagaattgactcaagctggtgtaatggcaattttgcccaagggaatgtatcctaatggcattcaaatgattgaaaaagacgagctcaatgatatgacttgttttattgtggctaaacctgaagaagaggttagtgagctacatttatttaaagatttgtatcaaattggcagtcaattcatcgcttctaactcggtcgaagaagcagcactgttggtcgcctctaggtctggctattttattttaaatgagaatacggctaggttaattaatactacagatttgcagccacttttcttgcttgatcatggtcagttaataaagcaaaagataatggctttttataagtcaaattcagcgttaagtagtgagtttataaagctattgcagcaagaatattaatctgtaaagttaaaaatatcttgtctaagtactataagatactgtaaaatatattatgaaagcggactcatatattttacattctggagatgatttttatgctaaaaagaactttgttacctttaacatcaatggtacttgttttaggattaactggtttggctagtcaagttgagactgttgatgcttcaacttatggtaatggtgtacaggttactattccaaaaaagatgcagggtacttggtactcttatgatcgtaatgcacataatggcacaaagatcacctttactgaacatactgttaatggcaaaccaatatttacccaggaggcttcgacaattagtgattacttcaatggtagaattgctaaccagaagaactttgataaggtaacgcaaaactggatgtctggtaaaactaccaaaatgaagaatgatacattctatgagattgatccgtggattacttttgaaaattggagtctttatcgagtggtaccacaaaccattaatggtaaaaagcataacgtgctggtttattctagtagatatgatggtggtaactacttcagaagcaagaaattagctaaaaaaatgaaggactacaagtttaagaaagttaattacacgttatagttttgtgacatcccttaactaagggatgttttttactaatagacgcgataaaatttagtataataatgacaaaattaattcttggaggagaagttatgaaattaaaacaaacaccaattttgcgtttatataaactagaaactaataaagaggatcatgcaaagttcgttaaggcagggcaacataatatgcttacttctcaagaaaacgaaccaggcacattgtttatgcagacaagtcatgacgaagaaactactaattttgtagtagaatgctatcaagacgaagcaagttatgatactcatgctaattcaaagcaatttaaggattttactgacgttgctaaagatattttaactagtcgagtaaaggtagaattgtttccggaatttatttctacaaaggcagaaaaactagcagttaccggatcaaatgattatgttatttatctgactgaaattggtgtttctttaggtaagggcgatgagtttgctcatgctgtaatgaaagaaatgaaaacggcagtcgaagaagaaaaagatattttggcaatgattgcaggaactgttgccgatcaaccaaatgaatggttagctattgaagtttatcgtaataatgaagcttacaagcagcacttggaaactaagaacttcaaagagtatttgaataatacaaaatattgtgttgaaagtaagagtttacgtaagttgcaaccagatgtaattgttgaccaaggtgcaattttctaccaaccataaagaataagacgaaaagaagaccaggctatgtggagtacataacctggtctttctagttagaggggaaaagatttattaacatatattattctggtttttagtggcgatgttttacctttgctactgctggtttattaattaatactgagctgatggccattaaaccaagcgttaaaaatgatccaccaattaagagtagtttaatcaaggttctcattcctttcatcttaattgatcttataatagcgaaataatattaagaatttatatgtaaaacctaatggattagttaagaaaataaaactagaaaaaaggctggttagcacgtaaaatagaaatagagtcaaagtctagtgcaactgcgcataaaataaagcagtatcgatgggatgctgcttgttttggttaaaaaatagagaatatgcttgtagcccttttcgtaaatagcgttaatgttgtaaaatggaaagtgcattaagtttattaatgagaaaattgatgtattattgcaaaataggccgtaatggccctttttgttgtgaaaaaattaaaagaatataggattggaaatgccaggaatagtagagcaaacattattagaacaacaaaatattgatttaaatgaaatggtaacaatgaatcaaatgattgatcaattgttgcctaatgcaagtaaagaattacaacaaaaactaaagattaaaatttataactttgtgcgtacacgtaaacaaccaagtattactgtgcgaagaagaaaatattttaagccggctgttgctaaattaattattggtaatgtacaagattacgcagatgcaattgaacgtcgtgctaaggaagccccagctaaagaggatgctactgataagaggccagcttctaaatctaagcgggttaagacaattactaagcgtaagattttagctaaagttataaagaatgataagattgataaatctattcaaaagaaattagaggataagattgcttcaattgtgaagaccaactttattaagccagttaacaagcggggaagtttttcggttgaagatggtgaaaaagttatagctgaacttagtcctttttatcaaaatatcaagattgatcaaaagtatcgcaagaatgctgaaaaagcggctgaaaataaggaaacagaaactaaagaaaagcctgagcaacattctaaggatcagaatgaaagtcgtgaaggtcaatctaaggactttgagcgtaagaataatcagaagaatagcaataatcgaaataataataatcaaacgcaaaatcaacgtaagcgacaaaataagcatccttttgagatcagaagagaaaataataaccgctcacgtaataatcagtctaaccgccgctataataatcgaaataattatgataatcggaataattatgaatttgatgaagctagcggtttgcgtgaacgctacaatacagtaatcagaaattacaatcaactggagcaaagatataatgctttgcaagataaatataatcaggctttagatgataaagctagattgatcgaagaaatgggtaagaagaacgaagacttacgtcgtgtattgatcgacgttttgcgaaaaatgtagtttttggtaaacaaagagactagtagtcaatttgaattgattactagtcttattttatgtttatgaaatatgatttagcttaaaaattaaaaaaatatgtgtaaaaaattatttttgcgtagtaagattaaaggatgataaatatttttattaatgattaatggaggagaagtatgagtttaaaagagctatttaaaagcaatgtgtttcgaggaaactgtcaaatcttttgtgtaaatagatttttctcgtagattgattttttaatcttttatttaatcaaagtaggattctaaggtatcctgaacctgaccgaagcctttgtggattcgattgaaatagcgttcgttgtagctcattgcttgaatgccaataaaagtatcaagcgactgttcatttggaaactctgctttaggtttagctttacgcttgataacgttgttaaaggattcgatcatattggtggagtaaattgaagccctgatctgcttaggatagctgtaaaagaccagcagatcaggctcaatctctttgagatctctgatgacatggttgtacgctctgttccacttgtcatagaaggcgtgcaagactttgatcgcagcttctttatttggctgttgatggatttgcttgaattcattcatgatcttttcacgatcgtcgacgcgtactttagcgcagatattgcgcatgacatgaaccaaacagcgttgaaaatgagctttaggataagtcctggccaaggctgttttcatgccaacaacaccatcagaaagaaaaagctcaacttgctttaagcctcgggatttcatgttttgaagcatatctgtccagacttcaatgttctcgctaggtgcaatgcagtagtcaatgacctccttgtgcccattaggcttgatgccaatggcaatatagactgcttcacgctcaaatgtttctcggcgcaaaggaaggtatgtcgcatccaaatagacgcagaaaaacttgtcgcttagcttgcgtttgtggtaagcctcaacctttggaatcatctgcttggaaatatttgatacctgagctggactgtaatggctgccatacatcttttcaattagatcggctatttccctggtggtcacgcccttggagtaaagcttgataatcatgctttccaagatatccgagtgctgcttgtagtcaggcagcgtgtgctgatgaaattgaccgttgcgatcccgaggcacttgcacttcaattgggccaaattgcgtatcaactttgcggaaataagcaccatttctagagttgccagtattccagccatttctggcatagggatcatagcccagaaaggcagtcaattcagcttctaacaagttattaacagcctgttgtagctctttgcacaataaatcatttattttgtctggattgaatagagcttgagcaaaatctttggtaaaatcattcatgaaggagttcttctttctgtatgtgtttttttgttcaaaccaatcatacgagaaaggaactcctttttctaatgtttaaagaaataaatttaaggaatcattcatccttacacaaactattttacagtctcgtttcgagcctgcattattatcttattgtatgttttatacgcattatttgggagttttagtgaatatttatttaaatatgctctgaattcaattactgctggtaattttaatacatatgtttattggcaaataatgcagtttgttttagcattattcacttcgttgcttttaccaattactaccgttgttttcactaggcagacgcaaaactatctgcataaaattcggcaagaaatcatgcatcattactattatgaaaaaagtgatgaaaaagtctctagtatgcagaaccgattaacagccaatttaaaaatcttatcagatgattatgctacaccttggattactatcttaagtggggttttagagattgtgattgctattgttttactagcaagcatgaactggattctaattttggttactgccattttagctgtgattacactttttgctcctaaaattatggagaagaaaacatcagctgccacagataaagtaaataaaaagaatgaaaagctgttaaatacaattgctcattggcttggtggattgcaggaactacgtcgttatagtgcatacagtcgtttggttaagcaaattcatcgatcaagtagtgattatgtggacgcaagtaagggtagtgcaaaattaagaagtgtaagttatttgattaatgcttttagcaattcaattgcacaaattggtatgagctttattgctggaatcatatttttgcttaatatgatttcattcggtgattttgcagttgctagtggttttgcatttacgattttttcagcaatttggaatattactcagtcgttaacgcaagttaagtcaactaaggctttacgcgaacagattaccgatttaagaaagcaagttcctgatgaaaataaagataaagtatcagcctacggtcttaaagtttcaggcttgtctgtaaaatacgatcagggggaaacaattttttatcctgattttacaataaaaaaagggcagaaagttttgcttactggcgattcaggaacaggaaaatcaaccttgtttaatgttttgttaggtaagctaaaacctgaatctggtacggtgacctatctagatgaaaatgaaactatcattcctgaaggaaaagctagaattggcaatatgccgcaaaatccagtagtttttcccgcaacgatcaaagagaacattacaatgtttaacgaaaatttgcaggataagcttcaagatgttgttcaagcagttcaactccaatccgacttagccaaaatgccagatggtgttaatacaacaattgatctaaaaagtgaaaatttgtctggtggacaacggcaaaaagttgttttagcgcgaacggaaatacacgagcaatcgtttgttttaatggatgaagtaactagtgcgatcgatcaaaaagctaccgaaaaaatcattgatgaattgctcaaaacagatcaaactattttgatgattgctcacaactttacgccagaattaaaagcaaaatttgatcaagaaattaaattaaaaagtaagaaaggggataaagtaagatgaatttgaaagcttttattaaaaccaatccagttcgtttctggttaactgcaattggttggattattattcctgctttatcaattaccaatacttacgttgtacaagaagagacgaatatccttttaagtcgtaattggactaagtttattttaatcaatgttcttgcttttctgattatgttagttgactatggtgtgagtgctttagttgattatcagcagcaggctcaggtacaagacttaaatgatcaagttagagataaaattgttaagcgatattattatgacgggaaaaagcatactgttgcacagatgcatagactgtaaaatagtttgtgtaaggatgaatgattccttaaatttatttctttaaacattagaaaaaggagttcctttctcgtatgattggtttgaacaaaaaaacacatacagaaagaagaactccttcatgaatgattttaccaaagattttgctcaagctctattcaatccagacaaaataaatgatttattgtgcaaagagctacaacaggctgttaataacttgttagaagctgaattgactgcctttctgggctatgatccctatgccagaaatggctggaatactggcaactctagaaatggtgcttatttccgcaaagttgatacgcaatttggcccaattgaagtgcaagtgcctcgggatcgcaacggtcaatttcatcagcacacgctgcctgactacaagcagcactcggatatcttggaaagcatgattatcaagctttactccaagggcgtgaccaccagggaaatagccgatctaattgaaaagatgtatggcagccattacagtccagctcaggtatcaaatatttccaagcagatgattccaaaggttgaggcttaccacaaacgcaagctaagcgacaagtttttctgcgtctatttggatgcgacataccttcctttgcgccgagaaacatttgagcgtgaagcagtctatattgccattggcatcaagcctaatgggcacaaggaggtcattgactactgcattgcacctagcgagaacattgaagtctggacagatatgcttcaaaacatgaaatcccgaggcttaaagcaagttgagctttttctttctgatggtgttgttggcatgaaaacagccttggccaggacttatcctaaagctcattttcaacgctgtttggttcatgtcatgcgcaatatctgcgctaaagtacgcgtcgacgatcgtgaaaagatcatgaacgaattcaaacaggtgcatcaacagacaagcaaaaaagaagccacagctgtcctgcatgacttctataccaaatggggcaaggtttacagccatgttatcagaagcttgaaagacatagaaccagatctgctggtcttttataactatcccaagcagatcagagcttcaatttattcgactaacatgattgaatcatttaacaatgtgatcaagcgcaaagctaagcctaaggcagagtttccaactgaacagtcgcttgatgcttttattggcattcaggcaatgagctacaatgaccgttatttcaatcgaattcataaaggctttggtcaggttcaggacaccttagaatcctactttgattaaataaataattaaaaaatcaatttacgagaaagaactatttacacaaaagatttgacagtttcgtaatcgggactttctgtattgaaaaaatgaagagataatttgttattgatctcaatttttaaatcttttttgttaacggtaagcgtataacagtgtcgtttgcagataaaaccatttcttaataaaaaatctacgattggattttcatttgaatcaatcatgacttgcaatgcttggtgctctgcttgaactatttttgaaaatggaatatttacagagtaatcacttagattgaattttagataaatatatttgttatgaaaaagattgtgataagtagaaatagtgcctagatgcttatcgttatcagttactttgtagattttaggagatattttttcaatttttgtagtcattttttatccttttgataattgaaattaatttttgatcggttccgtttttaattatgaagttataaatcggttcataattgagcacagggaaaataagatcaggatcaattttaggtataatgtcaatcattgatttcttactaattacgttgagatttttaacttcttgagcatttcttatctttctttttgcttgtgaaggaggataaccttgtccccaaggctgttcaaaaagattttttatagtctgctcaaaattgatttcaccactccaaccccaattaagtcctagtggaaaggagacaacattgccgttattgatatgaccaaaaagaaaagcatcttgtggagtggggatataaccacattgaatattaggaaaagtatttcatgcaagcatcattccttgtccagaagtacatcctgtcacaatgaagtcagtcgccttgctattaattaataatgcgacagctagggaaacttgcacgtaagatagactagccgaactatcttgataaataccaaaattgaatacttgatcattggatcctacagattctttgatatacttctctaatatgaaatttttacttttttgcgatgtagcttgaataatacctattttcatatttttaacctctatagtttattttttgaaagcgctttataatattatataggaagtaaagtaagaaggtgaacgtgatgaaaaaaattattgttggaactcctgttaaattgagccatgttttaatcggtatgattgtggtagttttactttcactatttttgacaggatttggttatcaagcttggtggctattccttattgtactaattttaggtgtatttgtaactttacctacttgttttaatccgtattggcagattagtagcgaaaatattacaattataaattatgatattaacgatgtgataaaattgatgcaactgctagggttacataaaaagagtaagcaagttattaatttatctgatgtaaagaaagctgccgttgtctatcgtaaaaatgtacgtcttagtcctattgactttaatcctgattatttaaatttgattttggatttaggtaagggaacaaatatgactttgacacttggaaatgtcgactatcagcaactaaattcgattatgggtttgttacaagataagaatattgtagtagatgataaacaaaatattttgcaacttttaagagaaaataaaaacttgtttaaccattttcacaagaaaggctggacatcgctataaatggataaagagcaaataattagaaattattttcgagcatggctaagtcctaatcttgaagtagtccaaaatacatttgacgaaaatgctatttatagtgaatgctatggtccagtttacagaaataaaaaggagataatatcttggtttgaaaattggaataaacaaggaaaagtaattgcttggccaatagaaagactcataattaatggtgatacgagcattgccgaatggcattttaaatgtaattatcaaggaaaaattagtgaattcgatggtgtatcaattatagaatttaatgatcaaaataagataatttctgtaaaagaatatcaatcaaagtccaaacattattatccctatagtaaataagacttttaactgttaagaggttaaaagtcttattttgaatatgaaatcttttataaactaatttctgtggaaaaaattaccaagccagcttcgtttctttttagcctcttcttttcgtcgctgttcacgatcttctaacattgccttagctagcatatcaactgtttgagtcaattgtgcttggttatctctttgttgcttatctctaaatgaactactgttttgatacttattcattaacgtatcatcatcaagccatttatcaaagttttcaacatcaataataaaaccggtgctagtttgttgcgatgcaatgtgatattttctaggcaaatatttaaagtagcgatcaagcatagtagaaccgctgtttttcgccgtttgatcggagattttattgaaaagttctttattgatttgggcttttagccggtcatcttgtttaataaataagatatcgcttccgatttttgcttgattgattaacattccccaatcatttcgaccaacaaatagggagtaatcgtaattttcttcaaaatatttgctgacttggttatacatatcaaatttatcaagtgcagtttttaaaacatgcttgattggatataagaagtctctttcaatcttctgcgcatcttcaacactaacgttagtaaagaattttgctaattcaacttgacaatatttaaaaagatcatcatttgcacgactaaataagctagttaatgcagcattacgttgatcactttcacctgaaaaagtagattcaaagcttaaataccataaacgacgcataatttcaggctttagagaaaattgtgatttaatagagctttcttgtctattcatcgtgaaaatgaatgctggtgagggatgagttaaattacgattgttagtaacttccttgatgaatctttcaaagtaagtacgggttgtaagctcgggactgacatcatcaatcattaatggacttacaggaccatttgtatatacatagtcacttagcgtgttggtaattgtcatattgatattactcttgccaagggcataattctttggatccatcattccactatctaagaaattatgagcaccaattaatttagcggctagtcttttccctagggtggacttaccagttcgaccttgtccgattagtgctgtagcaataggcacgtcttctctagatacattgcttccagataattcatataaattgcggattttccaaagccatggtgattcatatagaaacagcataaagtcacaagcttgccagccttcaccaacttctttgtaagtattatattcatgagtgatatcacagaaaagttgaagcgcattttttaattgcccttcagttaaatcagaagtaataacttcagaagggatgttatcaccaattttagaggcttggaataattgaccattattgtaaaactgaacaggaacagggaagagatcttcttctttttcaatttgtgatgtatctgcttttgcctttttgtcttgacgaataatgtgctgagtcaagctatataaatcttgcccgattgtatctagcttacgtcttttattgccaccttcaccaaataaagtaactgtttgagaagcaacgagtttttcattttcagataatttctttaattcatcatctttgctgtagtggtcgcgatacttttttatctcttcagctgggagaataattatgtctttaccagttgaattaggactgtttttgatttcaagagaagaatcttgcattacatgaatgcgaagatcgtctttatttttgtcttctaaataaccagatagttttttagcattaatataagttgtagcctgattaaggttatcttgaaacatttgttgatagcaattgaataatggatcagaagtattgccgtaatcccaaactaattgttccatatttttattaacagccgtatcggtaagattcattgaacctgaaaaggcagagtacttgctttgattttccattaaataaagcttagtgtgaatcaaattctgtttggtgaaaaaaagctgtaaactaccatctaaaatacgtttagtgaagggactatcttggtgttcgtagctatattcaatcaaatcacgacgtttatttaaaatttggtcaattcttttgccaattgaatttgatccattatcggttagtccaagaattagtgtgatctggtcaaaacgtggtataagattttgctcaataaatttaatattagaaacaaaggaaacgcctttaaactcagagaatttatttgactctctttgaaaatcaactaattgccaaaaatcggcattggaaattagtttttgatcagtatgatttagtatttctaatcccatataaaatcctttcgtgagtatacaaacatttgcttttagtgtatcgtgaaaaattggattagagcaaggaaaagttaatttattattgaatttatgaattagattaagtaaaatctgattcaaataacggaagtaaaaatataataatacgcgtggtgctagttaaatcgttttagttaataaaaaagtccaatcggactagactcaagttgtagtatcaaaaagaaaagagtctgatctgattgaactgccttaagcttaagcgttttagccaccatttacaagttagttttaaagatttagtgataatttgtcggcactggtatcgtttgtatgcaccggctgagtttactcatcggcgaaatattgatcaaattaaaactacggacagtctgattttggctttacttatctggcaagctaagacaggaattgaatcacaaagaagattctgtgaatgtttcaattgtttatcacactcacgttttaatcggcgttcacgtcagctattgcaattgatttatcagatacggcaagaaatgaataaaaaggttgacctgaatggacatttcttgatcattgacagctttccggtacctgtttgccaaccaattcgcaactatcgtgctaaaatttttcgcggttatgccaacattggttataaggccaccaagaaaatttacttctatggtttcaaagttcatgccattgttagcgatgacggttccattcttgattatgtcgtaacaaaagcatcagttcatgatgccaaggagacagttgaactgctggaaaatgcccatccatctaattactatcttcttggcgacgaaggctatttaggcaaagaactgcatcaacagctaaaacaaatgggttatgaactttggacaccatatcgtaaaaatatgacaggagctaaaaagcacaatgatcatcaattgatggctattcgcagaacaattgaaagcgacttttcgcttctgacctattacaatgccgagaacaatcgagcacgtagtctgataggctttcaaagccggttggaaattgcaattttagcttataatttggcttattgtctagaacgatttaactagcaccacgcgtataataatatgttatcggaaactgtcaaatcttttgtgtaaatagttctttctcgcaaattgattttttaattatttattcaaaataagattctaaggtatcctgaacctgaccaaagcctttatgaattcggttgaaatagcggtcattgtagctcattgcctggatgccaataaatgcatcaagcgactgttcagttggaaattctgccttaggcttagctttacgcttgatgacgttgttaaaggattcaatcatattggttgaataaattgaagctctgatttgtttgggataattgtagaagaccagcagatcgggctcaatttccttcaaacctttgatgacattgctataagctttattccatctggcatagaatttgtgcaagacagctgcagcttcttttttgcttgtctgttgatgcacctgtttgaattcgttcatgatcttttcacgatcgtcgacgcgtactttagcgcagatattgcgcatgacatgaaccaaacagcgttgaaaatgagctttaggataagtcctggccaaggctgttttcatgccaacaacaccatcagaaagaaaaagctcaacttgctttaagcctcgggatttcatgttttgaagcatatctgtccagacttcaatgttctcgctaggtgcaatgcagtagtcaatgacctccttgtgcccattaggcttgatgccaatggcaatatagactgcttcacgctcaaatgtttctcggcgcaaaggaaggtatgtcgcatccaaatagacgcagaaaaacttgtcgcttagcttgcgtttgtggtaagcctcaacctttggaatcatctgcttggaaatatttgatacctgagctggactgtaatggctgccatacatcttttcaattagatcggctatttccctggtggtcacgcccttggagtaaagcttgataatcatgctttccaagatatccgagtgctgcttgtagccaggcagcgtgtgctgatgaaattgaccgttgcgatcccgaggcacttgcacttcaattgggccaaattgcgtatcaactttgcggaaataagcaccatttctagagttgccagtattccagccatttctggcatagggatcatagcccagaaaggcagtcaattcagcttctaacaagttattaacagcctgttgtagctctttgcgcaataaatcatttattttgtctggattgaatagagcttgagcaaaatctttggtaaaatcattcatgaaggagttcttctttctgtatgtgtttttttgttcaaaccaatcatacgagaaaggaactcctttttctaatgtttaaagaaataaatttaaggaatcattcatccttacacaaactattttacagtctctgttatcgctttggagaaaattatgacaacagtatattttgtaagacatgctcaacctgatttatcagttcatgatgatttaacacgtcctttgacagaaaaggggttgcaagatagaaaaaaagtaactgattactttagagataaacacatcgaccaagctttttctagtccattcaagcgtgcaattgatacaattcaaccagttatagacgagaagaaactaacattatcatctatttctgactttagagaaagaaaaattggtgatgagtggatttctaattttcatgaatattgtgaaagacagtgggaagattttgattataagctaagaaatggcgagtctttaaaagagacgcagaagagaaatgttgctgctttgaagctagttttgtccaaatatcaagatcaaactatgattattggtggacatggtacagcaattggatcagtaattaattactatgatccaagctttaaatatgaagcctttgctatgatccagccaaagaatccatttattgtgaaaatgaactttgatggagaaaaatatttggagtataaagtagttactttttagtaaaaagataatctcataaagtaaaaatggtaaatcaaggtactaataaccagatttaccatttttttatttgttatattatagcttatgttaaattttatcctgagcaatgaaattatcataaatggttttgataactacttcttcatcttgccgtctggtaccaatcataattgagatttgggatgcaccctggttaatcatttgaatggagatgttctttttaccaagagggtaaagcaagctagcacataaagtcagcttgtccttcatcccttcacctaccaccattgtgattgcataatcatcaatccactgcatttgatcaggatttagactagtttgaatttcattacagataacatcaattaattgatcagttaagacatcttttttgaaaataatggtaatatcatcaattccagatggcatatgttcatatgaaacatgatgtttttgcaaaatttccattaacttcaaggtgaaaccagcacctttatttaacatatattttcttaaataaagggccgcgaagtttttgcctccggcaatacctgtgattgtgtgtttaggtataaagccgtcctctggtacgatcattgtcccaggtttttctggagcattagtatttttaacattgacaggaatttcgccttgaatagcaggaattaaggcttcatcgtgaaagacggaaaatcccgcataagatagttcccgcatttcttgataagtcattcttttaattggcttgggctgatcaacgatatggggattggctgaaaaaatagcatcgacatcggtgaagttttcataaagatcagcgtttaaccccctagctagaatagcaccggtaatgtcagaaccaccgcgagagaaagtagcaatatgtcctgatggtgtaatgccatagaagccaggaaaaatgatcttttcatcttttgcagccttaattctttttaagttcacataagtttcaggattgacttcagcattattagaagtgccagtgacaattaaacctacatcttttggctctaaaaatcgtgctttaattccttgatgatttaaaattttagcaatcaaaattgcattaagacgttctccgtgtgctttaaaggttgccatgcggtagtcattattagggtaacttagcttcggcaatgtaagtagaagctggttaatatcctctaattctgcttcaggcagctcaaaatattgggcaattaattcataacgcttaaaaatacgggtagcgatgtcttgataattattactcctcaagctcatatatgcgtaagtgatcattagatcggttactttaatatcatcctcagttcttttgcccggtgctgagactacaacgacttgtctttcgggatcggcattaataatacttagggccttatctccgctattacctgaggctagggaagaacctccaaatttaacaactttcatatctatttttccttaattattatttcaaatctaaaattgaactgatttctttttccatatcatttggttcaataattttttcggtcttgggttcacgatcaaaaagggcacgcacaccgattgataattgaccgcctaattcatcatgcaattctttaattgcaccgacgccagtttgcatactaggaccaccagtgatggcttcatacaccgtttctgggaacttatatggactggctgttgaaacaatgaccattggggtttgatcgccggtcttcttttgatattgatttgctacaaaagagccaacagcagtatgtggatcaattacatagcggtcataattgtagacccgtttgatttctgatttaacctcttcttctgttgcaaaaccagctgcaaaatttttttgtaatttagtgaaaacttcaccgctaacttgataatgaccgcgttgagtcaattgattcattaaactagcgacttcatagttattttcgccataaaggtcaaataaaagtcgttccaaattgctggaaactaggatatccattgctggtgcattggttaaatggaacttacgtcgcttatcgtagacaccattattaaagaaatcagtcaatacattgttttcattagatgcacaaatcaactttttaataggcaaacctaatttcttagcataatatccagctaggatgtcaccaaagttacctgttggcacagcaaagttaacttcgtctcctagtttaatttcttgtctgcgtactaattgtccataggtgtagaggtagtaagaaatttgcggaaccagacgaccaatattcatcgaattagctgaagaaaattgatagccattagcattaagtcggtttttgaaagaatcattgttgaagatttttttaacttcagtttgagcatcgtcaaagttacctttgattgcaattgcacgcaaattgttgccgcgttggctgagcatttgcttaagttgaacaggactaacgccaccttcaggataaaagactatgacatcggtacccttttgattagcaaagccacgcattgatgccgtaccagtatcgccagaagtagcggttaaaataataatatctttatcaatcttttcaatttgaacagctctggtcattaattgtggcaacatttgcaaagctatatctttgaaggcaagggtaggaccgtgaaaaagctccatgtaaaaatggttatcgtgcttttcgattggaacaatgctgcgatcatcccattgttcactataagcgctttgaactgcagtggtgatttgctccttagtaaagtcatcaaagaataagctaataaccatggcagcgatttgcttgtaggaaagtttggataaatcttctaacttaaaattagcttgaggaaaggcaacaggcacgtaaagcccaccgtcttgagccaagccttgaataattgcttgaggtgcagttaaagtgttttcttttgaacctctagtactacgatattgcataaacaatcttcctatcttatgaaatattaatattataactattgtaccttgattagcacctatgatacaatcgtaaaaataagaaaatcattaaaaagaggataagatcaaatggccatcaaaattgcattgcttggattaggaacagttggttcaggtgttttaaaaataattaaaaataataaaaagaagattagacaaacaagtggtgaagaaatcatcattgaaaaagctctagtacgtaatccagaaaaacatcgtaatttagctaacgaagtgatgctaactacagatttcgattcgattttgcaagatcccgaaattaaaattatagttgaattaataggtgggcttcatcctgctaaggaatatattactgcagcaatcaatgctggaaaaaatgtagttacggccaataaagacttaatggcaacttttggttcagaattgattaatttagctgcaagtaaaaagtgtgatttaatgtatgatgctagcgttgcaggtgggatccctattttgcggaccttggctacctcttattccagtgacattatttccgaaattcaaggaattattaatggtacgacgaattatattttgtcacaaatgggggaaaagggactaagctacgaggaagcgctgaaaaatgctcaagagctgggctttgcggaggctgatcccactaacgatgttacaggtaaggatgcagcatacaagattgtaattttaagcaagtttgcttttggtactaagattagtattgatgattttactattcaagggattaataatctaaaggattttgacattaaacaggctcagaagttaggctatgtcattaagctgattgggattgccaaaaatattaatggtaaattatttgtagaagttgctccatgtttgttgccagaaaatgcgattatggcgcatattaaaaatgaactaaatgctttacaaattaagagccaaagcctaggaacagcagtattcacaggcccaggtgcgggtagctctgcaacggctaattcagtcatgagtgatgtgattactgaaataaaaaacgtagtgaaaaagaccaccggtcagccatttagtaatttctcccatgttatgcaattaacaagttcggaggatgtgaagtattcctattatttatctttcgaagcagaagagaccttgtttgatttgagtaaattactctctgatttggaaattccggttcgtgagattaaacaagtacaatcaagaattgtagttgtaaccgaaaatattagtcgacagcagctacaagatttagcgattcaagatcaatatttaaaagctagctataagattttgcagtaaaggaagggaaaaaatgattattaaagcaccagcttcaacggcaaacttgggtcctggctttgattcacttggcatggctgtttcactttatttggaagtagaagttttaagcttagccgatcgctttcaggtggatcatgtgatgaaaggaattccacatgatgaaaaaaatttaattgttaagactgcactaacagtttatccagggttaccaccgcttcatttacgcgttaaaagcaatatcccattggctcatggtttaggtagcagttcaagtgctatcgcagccggaattgaattggctaatcaaattggtaagctgggactatcagatgaagaaaaggttcaattaggagctaaaatcgagggacatcctgataatattgcaccgactattttgggcggcttggttgttggtgctgaagttaaccatcattttgatgcagttgaagcaccacttcctccatatgcgttggtggcttatgtacccgattataatttggaaactaagacagctagagcagttttgcctaaagaattagcttttggcgtagctacgcatggctcagcagttgctaatactttaattgctagtttgtttgctcaagactaccctaaagcaggagaattaatggaacaagatgtattccatgaagtttaccgagaaaaactagtgccagaacttgtaaaagtgcgggaggtagctcattcaaaacatgccttggcaacttatttgagcggcgcaggttcaacgattatgacgtggattgaagataaacatgtagctggatttttgtcgggcttacgtaaacatgatttaaaagatgagacattaatcttacatcctgatgaacacggtgttcaaattatccaataaaaagactgaccaagcggtcagttttttagtcgtcaaaggttgcagcaaaactatcaccatcgattagcattcttttagcattgacagcataccaataaggaataacttcagtgccattttcttgctctaattcacagtcggccatttttaaaatttggtctaaatttttagcactgatgttagggtagagcttcagtaaagcttcttgagtaatgccactttgtttaaagccactagtgggataattggcagaaaaaatatcagaaaaatcatctaagtcatatctaggcttaaattctccatcaaagtatttgatttcgatgttttcaatttccataaaggcaccaagttgttttgccatgtaagggaacttattagctagttgttcaacagtaaaaccattgtttgctttagttcgtgcattgggatccagtttaaaccaagcttcacgtatattatgactatcttttctttcaataagaaggtctttgactttttgaatagctgcattgtgtctgtttacggctttttgccagtctaatcgattaggatataactgtctatagcggacagacaagggatgatcgattgcgttgtagataaaattcagcttgtcagtggtataagaagttagttcatcgtcacgccacattaattcatagtaagaactcatgaaagacacctttctatttggatagactaattaatattaactgaatagtatcattttttgctccgattaacaaaagtgataaaaatgtctatttagattggtcagcagcaaaacttttgttaaaattaatgtgtttactattagtatttgctcaaaggatttgacaaactatggatcaacttgataagttcaaccgacgctacaattttctttcaaaattgtcagctgccttcttttattcaattgcggttgcagttgccttgaactttttttggacgccggggcatatgtactcgtcaggaatcacgggttttgcgcaattaattaatactgtaagtgaaagatatctaccgtttacattatcaacatcaatgatgtactttcttttgaactttcctttatttatattggcttggttcaagataggacataaatttactttcttcaccatcgttgctgttgttctaggttctatcatgatgcacgctattcaaccttggcagatgcacctggacccactggtttgtgcgatttttggtgcttcgatcaacggtattggaactgggatggcattaaagaacggtatttcaactggtggactcgacattattggtattgtaattaggcaaaaaacgggcattagttacggaaaatttaatatttttattaatttgattattatcgctgctgcgggatacatgtttggttggccacgtgctctttattccgccttgactatttttattaatgggcgagtaattgatgcggtttatacccaacaccagaagatgcaagtaatgattgttactcagcacccacagcatattatcgatggtattcaaaaccggatgcatagaggaattaccattttgcatgatgctgaaggtgcatacagtcatattgaaaagacagttttgattaccattattgatcgatatgatatgtatgatattcgccaaatcgtgcaaggagcagatccgtatgctttcatgagtgttagtgaagttgaaaaagtatatggtcgcttcaaggagcaagaaatcgtttaatggatagcccttaaaccttgatatataaggatttataaatgaaatttgaatcctaggggcactttgggagcaaaactattcaaaaagaagcagaaatgcttcttttttatttggagtggctttttgtaattatggctttattattggtctttgttaaaagtgattaaaaatgatattatttcgattgagggatgttgatatatcgtggatcatttagtgtattctccacgagtgtggaggtgatcctatcatcttgaagggcacgggagacaaggcagagtattctccacacatgtggaggtgatcctactgttaacggtgatgactggtatccagttagcgtattctccacgtgtgtggaggtgatcctactttgagctgtgtcaacgccacagccgtttagtattctccacacatgtggaggtgatccaagtcgttacatcagccaaaagatgaggcttaagtattctccacacatgtggaggctaaatagctgctctgaaaaatatgttctatagagtgactgtttttgtatattatttaaaaatattgttgatggtgcacggagattgcgttcacttatatagtgaaaagatgctaagaaatctaaaatagaatcgagatgaattggtaatctggtaatcgtaagaaggacttagctactaatcgttgtattcaattttgataacaaattaattaaagagcaaaaaatatgaagaattataaatttaataagtttatgtaaaaacagtgtcattaagttaggctattgattttggtgaaaaaacaattaaagcatcatttggctttagacggccagattgatgccctttttggcatatttttctaaatatcattcgcgttacacgtaaaagcgtgtgttgtatatagtgaaaggaggctaagagaatcggagctaagaggtgacaaatatgccgaaagcctataaaattaactcatactggcaaaaatactaaatggtcattaaagttctatcctaaaagagctttgttaactggtgttttgattgtgattgctatagcattatggaaagtgatttttaatggctaaatatacagaagtaaataaaaagtggaatgataaaaatgaggcccgtaagctttacattaataagaggtcaacgacgaaaaactttattttaaatcttgctatcgaagatgatttagaacagattgaaaaggatattgaagaaagacgcaataatttgtaaagaaataaaatgggatacatcaggtaataaaaagtgcatctcatttttatttgtatataatactagttaacttaaaaaagcaataaaattcaaataaaatggaggtatttcaaagaatgacagagaataataaacaagccaaaaccactgataccaaggcaaaacccaacaacgacacagcaatcttcgctggcggttgtttttggtgcatggtcgaacctttcgatacagttgacggagtagaaaaagtagtttctggttatactggtggtcatgttgctaatccaacatatgagcaagtctgttcaggtacgactggccatactgaagctgttgagattacctttgatccagcaaaaatatcgtatgatcaattgctaaactattattggcaagtgactgatcccacagatgcaatggggcaattccaagatcgtggtgataattatcgacctgtaattttttataattcacctgctcaaaaagaagcagctgaaaaatctaagcaaagattacaagctagtggtaaatttgataaaccaatcgtaactaaaattgaaccagctaagccattttatccagctgaggaatatcaccaagatttttataaaaaagatccacttagatatgcaatggaagaagctggtggaagagctaagtttatcaaggaacattgggattaataaaaagcagatcataactgttataagctgtgacctgcttttttactttcaatattttagattatgttaactatttctttaagttgcttttgataacctcgattggattgagccaagttccgttgttaacgttccaattcttacatggaaaaccatatttgtttatgtaatctttatttgtttgagtaacgccaaggtgtaagtgtgagccagttagcttaccgatcttttgatctaatttaatcttttgaccagtcttaacataaatgtcttttttcttattaaacccttcttggtaaacttcaacgtaattatcaggactaataacccagatgaaccagccaaggccgttgccataagcaacctttttaacagtaccttgatgaattgcatatacgttagaatgcccaacttctgaaaaaccaaaatcccaaccatcatgaaagtaggaaggtggtgtagtagaacgcatatagttagttatgccaaaagtttgtgcattatacattggacgaacaccatttttcttgttggctttaaacggataagcccacttgaggttcttgggttgaacttcagttgtattttgtgagtcatcaagcgtatcagcagaagcagtggtggttgataaaccaacgcttgaagttaataatgcagtacctaacaaagaaattattaatttacgaaatttcattataaaaagaaaccagataagttctgatttttatctcctctcttaattcacctaaactattgtagctcagcagttttacgagaaagttacaattaaatttcgattaataacaaaaagttagtatgagtatatgtgaatatgtttttaattacgagtctaggtatttttgaaatttctttactttattttgggatttacatagaattaaattaataacgtttacattgaatttagtaaatgatagtagacattaattgggctcaaaaataataatttggacgaaactgtcaaatcttttgtgtaaatagatctttctcgtaaattgattttttaattatttatttaatcaaagtaggattctaaggtgtcctgaacctgaccaaagcctttatgaattcgattgaaataacggtcattgtagctcattgcctgaatgccaataaaagcatcaagcgactgttcagttggaaactctgccttaggcttagctttgcgcttgatcacattgttaaatgattcaatcatgttagtcgaataaattgaagctctgatctgcttgggatagttataaaagaccagcagatctggttctatgtctttcaagcttctgataacatggctgtaaaccttgccccatttggtatagaagtcatgcaggacagctgtggcttcttctttgtttgtctgttgatgcacctgtttgaattcgttcatgatcttttcacgatcgtcgacgcgtactttagcgcagatattgcgcatgacatgaaccaaacagcgttgaaaatgagctttaggataagtcctggccaaggctgttttcatgccaacaacaccatcagaaagaaaaagctcaacttgctttaagcctcgggatttcatgttttgaagcatatctgtccagacttcaatgttctcgctaggtgcaatgcagtagtcaatgacctccttgtgcccattaggcttgatgccaatggcaatatagactgcttcacgctcaaatgtttctcggcgcaaaggaaggtatgtcgcatccaaatagacgcagaaaaacttgtcgcttagcttgcgcttgtgataagcctcaatcttggggagcatctgcttggaaatatttgatacttgagctggactataatgactgccatacattttctcaatcaagtcagcgatttctctggtagttacgcctttggagtatagcttgataatcgtgctttccaaaacatcagagtgctgcttgtagtcaggcagcgtgtgctgatgaaattgaccgttgcgatcccgaggcacttgcacttcaattgggccaaattgcgtatcaactttgcggaaataagcaccatttctagagttgccagtattccagccatttctggcatagggatcatagcccagaaaggcagtcaattcagcttctaacaagttattaacagcctgttgtagctctttgcgcaataaatcatttattttgtctggattgaatagagcttgagcaaaatctttggtaaaatcattcatgaaggagttcttctttctgtatgtgttttttgttcaaaccaatcatacgagaaaggaactcctttttctaatgtttaaagaaataaatttaaggaatcattcatccttacacaaactattttacagtctcatttggacaatgaaagtagagaataataatgacgaagttaaataatgaatatatggttggtctagatattggtactaattcatgtgggtgggttgctactgattttgataataatatattaaaaatgcatggaaaaagagcacttggctcgcacttgtttgatgaaggcgtatcagctgctgatagacgagcttttagaactactaggaggcgtataaagcgaagaaaatggcgtcttaaattgttggaagaaatttttgatgaagaaatggcaaaggtagatccaaatttctttgctcgtttaaaagagtcaggactttctccattggacacaaggaaaaatgtgtcttcaattgtctttccaactaaaaaaatggataaacaattttataaaaaatttccaactatttatcatttaagaaacgctttaatgaaacaggataagaagtttgatcttcgggctatttatattgccattcatcatatcgtgaaatatcgaggaaattttttgtctaattcatccataagtaattttagtgcgtcaaagattgaaatcgataggtttgtaaatgaactaaacgatctttattccatatttctgccagaaagtggagtgatttttgatgcaggaaatgcttcaaaagttgaagacattattcgaaatgaacaaatgtttaaactggataagataaaagaaattgctgatgtgttacccgacactgaaaataagtctggtctaaaactaagtaaaaaaatttcaaaagaaattagcaaagcaattttaggatacaaagcaaaatttgaaattattttacaagtaaatgtagacaagactgacagctcaatttggaattttaaattaaatgatgaaaatgcggatgtaaatttgagtgaaattacttctgatttaactgatactcagttacagatattggatttagttagaaacttatttagtgcaatttctctactgaatattgtcgatgaaggttcaactttatcggaatctatgataagaaaatataacgatcatgcccaagatttgaaattgctaaaaacagtaatcaagaaccattcagacaggaaaaaagctcacaatttacagttggcttacgacaaatatgtcaataaccgtcattttgttgatgttgaaactaaaaaagcctttcccaacaagcacctttatcgaaaaagcgatttttatgaaatagttaaaaagaatttggatgcatcaaaagaggcagttcaaattagaaaagaaatagcgttagataagtttatgcctaagcaacgaagcgatgaaaacggcgtaattcccttccagcttaatcaaatcgagctagataagataattgaaaatcagggaaaatattatccatttttaaaagagattaatccaattaaagctcatcgtatgcaggcaccttataagcttgatgaactgattcgttttagggtgccatactatgttggtccaatgattgaaccaacaaattcatcttatcctcaaactcgacaaaatcaatcttttgcttggatggttagaaaagctaaaggtcgaattacgccttggaattttgatgaaaaagttgatagacaaaagtctgcaaataactttattaaacgacttacaacaaaagatacttatttgtttggtgaagatgttcttccagcaaatagtcttttatatcaaaaatatactgttttggatgaattaaataaaattagtgtgaatgggaagaaattatctgttagcgtaaagcaagaactttatgaggacttattcaaaaagaataatactgtctcagctaagcagcttaaaaattggttaatagaaaatcagaaattgccttatatcaaaattaaggggttagctgatcaaactaaatttaattctagtttatctacatacattaaattaaaaaagtcaggtttatttgttgataaacttgactcaaatgaatttcgtgatgattttgaaaaaattattgaatggtcaactatttttgaagataagcagatttatatacaaaagcttcaaacaattgattggcttacagcaaaacaaattcaattcctacaaaatattagacttcagggttggggcagattatctaaaaaattgttaactgctattgtagattcaaatggtcaaaatattattgagcagttgtggaatagccaacaaattttcatgagtatagtaaataaagcagatataaaaggcacaattacagatgcaaatcaagatctcatgcattcaaatagtatggaagatattttatcagaagcgtatacttctcctgcaaataagaaaatgattaggcaggttgtaaaagttgttcatgacattcaaaaagctgcttctggtcaagcacctaaacaaatagctattgaatttgcacgtgaaagtagaagaaattctaagttatcacaaacacgagggcataagctacaggatatttaccaaaaaatatcaggagatatagtaaataaaaatttgaaggataagctggctgaatatatcaagaataatcaattaagtgtctgggaaaaaaatagcttccagatgaataaaaacgatcaagatttccttttttaagaatcttgatcgtttttttgttctctttaaaatttttaacaataaaaatcggcccttcagccaccttctttgacaatatttgttcaaattcatcatcataaaggcaattccgatatcggtttcgaccttctctttacctcgcaggtgcgttctgcgcatgccaaatacgttcttcaaatgtccgaaaactggctctacatcatattttctcatgccatagatgtgtctgccttcttcgctttggagaacttcttttgctttttcttttaaatattgccagttaggattatagcgaacttggcgctggcggccgctagctgttttagccaattgttccaattctggcgttagctggaactcgtctgcctcataaaccttaaaatcacggacctgaccagtagaacgatccttgcgctggctgtaatatttgaaattgaatctgacgccatgatgatcaatgtaataatcatctttttcattgtagtaccagttgattagcttagttggatcattcttatactttttggtctgttctttttcatacatagtgtagggaataaagtacttcttgtctggatatttttcctccagcatcgaataattgtattcactgccatagccagcatcggcgacgattttgtcaaacttgtccaacacggtcatttgatccaaaaccggctccaaagttttgaaatctgtcggattaggaaagatggcataatcaactacatattgatcggtcgtgactgcttgaatattgtagccaggctttaattgaccatttttcatgtggtcttccttcatatgcataaaggtggcgtcatgatctgttttggaataactgttgcgtccggcaaagatctcttcggcttcttcatatttttgcattcttggcacataatcttttcttagccggtgcagaatcttttttagtccacgtcgcttggcttttcgaggtgaaccgccaggaatggctttgttttcctgctcaatctctttagtcagcttgttaatttctgcttcagtttcttgagctaattcctttagcccctgactagtttgaactttttctttttccatttctttgactacttctttagtaatcaattcatcataaagttcaactgcctggcctttcagcttttcatgatacttttcaaccgctttgcgccagacaaatgtatagcggttagcatcagcttcaatcttagtaccatcgataaaagcagcaccttcattgattaagccttcatcttctaacaggttagtgaagtagataaagctctttttaatcagttcattggcatggctgcttgatctaaaattattgatagtatgatatgaaatcttttgctggtcagccaagatcatcattggcagattttcttccagcatcaactcaatctttctgccagaaaaaactcttctggagtaagcaaaaagcagtattttgagcatcatggctggatgataggctgggcggcccgttttagcagtcttgcctactaaaacatcttctggaattgaatctacaaaccagctgatgacattagccaaatgattggccggaatggcaaaatctagattaagtgttaaagcagtttgacctgtgatataattcttgtacatgttagtttccaccttttttattttgtgatgatttaataatatcaaggctggagctaaaagtatacaaaaagagcgttgaaacaaaaattcaacgttcttttttcatgatctgagacttagttttttcccagacacttcatgcaacttggaagagatgcttatactggtaagccaattaatattgatgaagtatctcagtattatgacatagaccatatcttgcctcaaagttttattaaagatgattccctgaataatcgtgtgttggttgctaaaccaataaacaatggtaagtcagatggagttcctttaaaactctttggtgataatctagctactggtttagggataacggttaagcagatgtggaataactgggctgataaaggactgattaataaagcaaaacaaaataatttattcctagatccagagaatattaataaacatcaagcttcaggttttattcgtaaacaattagttgagacaagtcaaatcataaaattagcaactacaattcttcaagctgagtatccaaagactaaaataatagttgtcaaggctagttctaatcactatttacgtaatgagtttgatttgtataaaagtcgagaggttaatgattatcaccatgcaattgatgcatatttaactactatttgtgggaatctactgtatcaagcgtatcctaaattacggccattctttgtttatggtcaatttaaaaagtttagttctgatcctaaaaaaagaaaatgaaattttaaaaaagaccaaaaattttgactttgttgccaaacttttgggtagtaaagcaccaaatgagatcagatctcaacaggggaaagttttatttgaaaagaataaaattcgattgcaacttaataaggcatataattacaaatatatgcttgtatctagagatacgacaacaaagaatcaagagatgtttggaatgactatatatcctcgggctgaacgggatatagcgaagagtcgtaaattaattgaaaaacgtaaaggattttcaacagatatttatggtggctatactggtactgcagcagcctatatggcaattgtaagaattaataagactaaatcttcacagtacaaagtaattgctgtacctatgacgaagcgtgctattttaaataaagctgaaaaagaaggtaactatgaaaagattctaaagcaaattttatcaccaagtattttatacaacgataagggaaaacgaaaagcaggagtaatatcatttgatattattaaaggtaaagttccatataaccaggttgtgcaagatggcaataaaaaatttttgttaaagagtgctatttatttatgtaatgcaaaacagttggttttatcagaagaggcaatgagagtaattactggtcattggctagattctgataagcaagatcaagaacttttggatgtttacgatgaaattttagaaaagattgatagatatttacctttgtttgacattagagattttagaaataaattacataagggtagagaaaaattcttgaaattaaacgctgaggataagtttaaagctattattcaaattttgaagggtttgcatgataattctgatacaggtgaacttaaagatattggtataactgtaccatttggtcaacttcaaaataattctggaattacattatcttcggacactattttagtttatcaatcacctactggtttgtttgaaaaacgcgttaagatttctagtttataaaaataaatgaggaaccgacatgtggttcctcatttttacataaaaaaagtccctcgatagctcgggacaagtgttgaaactctgcgtactaaaacgcattgcttgattttaaattatgattgttagatcaataaggttaagagttgggagctacccaacaaataaataatatcattatagatatagatgtacaaggagaaaaaatgggatggcgtaacgtaataataactcagcatgcaaagctaacatactctatgaatatgcttatagtccaaacaaaagatggtattaatcaaatacctattgaagatatcaatttggttttaatttcaacatcacaggctgtgattactagtgctttgataagtaagttagccaaaaatcaatgcaaggtaatctttgttgatgataaatatcaacctgttacagagacagtgaattattatcctggggctagggacataaagaagttgaaaatgcaatttgaatggaatgaaagaagaaagaaaatttatggaccaaaattgtagctgctaagctaaaaaatcaaatatcggtgttaaaaaattatcgaattgatgaaactgaagttgagcaagagctgtacaagttagaggtgaacgatttatccaatagagaagcagcggctgctagaaaatatttcatgaagttatttggtaaggactttattagaagaaattccggagtgattaatgcagcactagattatggatactcaatattgctttcatccttcgatagagaaattgcaatgaatggatatttgacttatctgggaatacatcatcattcagtggaaaatcaatttaatttagcttgtgatttaatggaaccatttagatccatagttgattattgggttaaggcacacgaaaatattaccagttttacaccagatattaagtatggattagttgagttgcttagcttacaaataaaattcaatggtaggaatacaattttaacgaatgcaatttctgtatatgtaagaagctgccttagatatttaagtggagaaacagatgatattagaatagagatgagtttgtgtaatgaggtaccgaatgatgcgattaatgataatgtttgatttgcctacggacactgccgctgaaagaaaagaatatcgacaatttagaaaagctctaataaatgaaggatttttaatgattcagttttcggtgtatgaaagagtatgtgtcactagacaaacagctaattttttagaaaagagaataagaaaatttatgcctagcaaaggtgttgtgcaaagtctaatggttacggaaaaacagtacagtgatatgcatttcttggttggggatgcagtaaaagatattcgcaatacttcagacaggacagtgatactatgattgtttcctatttgtcacataagaaaatctgtttaaaagatggaattaatgttatttgcactcaaagtcccattgcctataaagatctggttttaggttttcaagccttaaatgatctaatagtatgttctgatgacgaatacaacaataagtctattagtaagagttttgattttgtaggagccccgttgttaaatgacaatattatggcaaagtatatgaatgtcattattaagaactttatttctaacttggatgaggtaaacagaaatagaattttaaaatctttttattcattagaaacagtattgaatgattctttgcttttggaagatttacctttagaaattgattttagcgaagatattaaaaagctgttgaaaatggttaacattcatttagatgctcaattaatgttaacgagactgtaaaatagtttgtgtaaggatgaataattccttaaatttatttctttaaacattagaaaaaggagttcctttctcgtatgattggtttgaacaaaaaaacacatacagaaagaagaactccttcatgaatgattttaccaaaaatatagcacaagctctattcaatccagacaaaataaacgatttattgcgcaaagagctacaacaggctgttaataacttgctagaagctgaattgactgcctttctgggctatgatccctatgccagaaatggctggaatactggcaattctagaaatggtgcttatttccgcaaggttgatacccagtttggaccaattgaagtgcaagtgcctcgagatcgcaacggccagtttcatcagcacacgctgcctgactacaagcagcactctgatgttttggaaagcacgattatcaagctctactccaaaggcgtaactaccagagaaatcgctgacttgattgagaaaatgtatggcagtcattatagtccagcccaagtatcaaatatttccaagcagatgctccccaaggttgaggcttatcacaagcgcaagctaagcgacaagtttttctgtgtctatttggatgcgacataccttcctttgcgccgagaaacgtttgagcgtgaagcagtctatattgccattggcattaaacctaatggacataaagaagtcattgactactgcattgcgcctagtgagaacattgaagtctggacagagatgcttcaaaacatgaagtccagaggcttgaagcaagttgagctctttctttctgatggtgttgttggcatgaaagcggccttgaccaggacttatcctaaagctcattttcaacgctgcttggttcatgtcatgcgcaatatctgtgctaaagtccgggtggatgaccgcgaaaagatcatgaacgaattcaaacaggtgcatcaacagacaaacaaagaagaagccacagctgtcctgcatgacttctataccaaatggggcaaggtttacagccatgttatcagaagcttgaaagacatagaaccagatctgctggtcttttataactatcccaagcagatcagagcttcaatttattcgactaacatgattgaatcatttaacaatgtgatcaagcgcaaagctaagcctaaggcagagtttccaactgaacagtcgcttgatgcttttattggcattcaggcaatgagctacaatgaccgttatttcaatcgaattcataaaggctttggtcaggttcaggacaccttagaatcctactttgattaaataaataattaaaaaatcaatttacgagaaagatctatttacacaaaagatttgacagtttcatgttaacaccatatgctataattgaaacagttcttaagattcatcaagaatataatcttgatagtattcccgtgttttgtaatgtagctcattaccttgatgaaacacagttaaaagaacttagtaagattgttagacaacttaaattgaaaattattttaattgaattcacagataagaaatatggggtagcagtcaaggatgctcaagttgcatatattgatcgagatcttgttgattggtattagacaattgattaaaaagatattatgaaatatcggttttagatgattgttagatcaatgaggtttagatcagtagtctccaattcaaaaggtgcttacgtgttttagatgattgttagatcaatgaggtttagatcaagcacttgaatcttgtccctgctaggaacgttttagatgattgttagatcaatgaggtttagatctcgaatttagaaaaatcaacattaacgcgggttttagatgattgttagatcaatgaggtttagatcccgtgaaaacggcgtttacatgcgtaagacgttttagatggttgttagatcaatgaggtttagatctattagcttttgcggcggtaccaacgtacggttttagatcaatgaggtttagatctaaagaaataaataatagaggtgtgaggtagttttagatgattgttagatcaatgaggtttagatcccactatcgcgcctggaatacctgttttctgttttagatgattgttagatcatgggagtcagaacagtaatatgcataaatttacaaatatttttctgtaaataaaaatcgctctagagaaactctagaacgatttttggacatacttgatcttagtatctattattacttagcgtaatcatcaatacccaagtgctccaaaataagtgcggcagtttcttcaatggagcggtgagcaacattaattacatagcaacctaatttcttataaagtgcttgtgctgattcaagctccttgttgattgaatccatattagaataagtagtatcaggattcaaaccataagcgatcattctttgacgtctgatttcgttcaatacagatggatcgttagtcaagccaataatcttcttaggatcaatttcgtagatttcttttggaatgtgagtttcaggaacaagtggtaaattagctacctttaagttcttattggctaagaacaaagaaagtggagtcttagaagttcttgataccccaagtaaaacaacgtcagcttccaagaaaccttttggatctttaccatcatcatacattacagcgaattccattgcggaaattctgtcaaagtacttttgatttaagctatgctgtgcaccaattttttgatctggtgtcatatgagtagtttgttgaattgcttcaactacaggtgagaagatgtcaacacattcaacattatgctcacgggcaaatttgataactggcatttgcatttcatctttaaccaaactgtagataattaccaagtttggatatttttcaatttctgttaaaacttcgtccaacttcttttggttagtgataaaggggtaacgacgatagttgatattgcagttaggaaattctgcagctgcagctgtggcgttactaaaagcagtgtcaccagccgcatcagaaataataataatgtttaattcattttggtcttttgtttctaccatattaagctcctcgtgtattattaaatatctttctgaaaataattatactattaatgaaagcggattaacaataaaaactcagctcttttattaaggtaaagtagtcggtttacttaacttaaaaatttatcaaaaagtttttgaattgtattgaccctaaagattagtttggtataatttaagtaaatgtatggcgtaacgccaagaaatggaaggagggatcacacatggctaagacaatcgttcacgaaaacgagtctattgatgatgctcttcgtcgtttcaagcgttccgtttcaagaagtggtaccttacaagaataccgcaagcgcgaattctacgaaaaacctagtgttcgtagaaagttgaagtctgaagctgcacgtaagcgtagacattattaataaactactgagaaagctacctgtttttgggtagcttttctttttgacttcttgaagcataattttgattatgttaagtaaatatttgttagttttattttagttaagaacatagtttgttataatactattgggtttttaatagaaagaaggatattaaatgagtttgtcagatcaaatcatggctgatatgaaatcagctatgaagaatcacgacaagacaactcttaatactgtccggatgatcaaatcggccttaatgaatgaaaaaattaaagcaggacacgatttaactccagatgaagaattaactgttcttaatcgtgaaaagaagcaaagagaagaatcgattgacgaatttattaaggctaatcgtgatgatttagctgaagaaaccaaaaaagaattagcagttgtagaaaagtacatgcctaagcaaatgaatcaggatgaacttagagcagctgttaaggaaacaattgatgaagttggtgctaaaggtaagtccgactttggtaaggtaatgaaagctttaatgccaaagattaagggacgtgccgatggcaaggctgcttcgcaatcagttcgtgatcagctaaattagtagtaacaagaaggagcgggtctatttggctcaaacaacttttacacctcaaagaccagaaaatattcaaaaactagttggagttaatgacggaaatttaaagcttctttctgaaggttatgatctttctgtgtcagatgtcggtaatgagattgtcattgcaggagacgatgaagagaagatcaagaaggtagttgctgttctaaaggcactcgatagtgttgtgaatactggtgttaacatcggtgcgcccgacacagtaagtgcgatgaagatggctgacaagggtaccacagagtactttgcagacctatataaaaaggttttgattagggatgctaaaggtagacctatcagagtcaagaatatgggacaaaagcgttatgtcgaagctattgataaatctgatgttgtctttggaataggaccagctggaacggggaaaacattcttagccgtagtttgtgcaattgccgcctttaagaagggagaagtttctcgaatcattttgactaggccagctgttgaagctggtgaatcacttggatttttacctggtgacttgaaagaaaaagttgatccatatttgagaccaatttatgactccttgtatgctattcttgggactaatacgactgaccgtttgatggaacgaggcgtaattgaagttgctccacttgcttatatgcgtggacgaactttagatgacgcttttgtaattcttgatgaagcccagaacactacagatgcccagatgaagatgtttttaactagacttggatttaattctaagatggtcgtaaacggtgatatgacacaggtcgatttacctggtcgacagcatagcgggttaattgatgctagacatatcttgaagaatatcgaccaaattaaatttatcaacttttctgctaatgatgttgttcgtcaccctgtagttgcgaaaattattactgcttatgaaaaagaggacattaaacactaaaaatggatccaattgatattacttataatgatgaagttggctttttagatgatgaaaagcgtaactggcaagactggattatgaaacttttgctgctagctaagaaggaaattggcaaagataacaacttagagatgagtattaactttgttgacgaagatcgtagtcatgaaattaatttaaagtatcgtgacaaagaccgtcctactgatgtaatttcctttgcaattgaagatggtgaggattcaattgatcttgcagcatttgcagatgatccagactttcaagaggatatcggtgatctatttatgtgtcctagtgtgattaagcgtcacagtaaagagtatggtacaggttttgatcgagaatttggatatacaatagtccatggctttttacatttaaacggctacgaccacattaagccggatgaggccaaagaaatgtttggtattcaaggaaaagtgttagaagattatggtttgccattgtatcctgatcaattagatgaaggcagaggtaaataatggaagaaaaagagtttaagtctggctttgttgctttagttggtcgtcccaatgttggaaaatcaactttaatgaactatttagttggtcaaaaagttgccattacgtctaataaaccacaaacgactcgtaatcgcatttcgggtatttatacttcagatgaaatgcaagttgtttttgtagatacgccaggtatttttaagcctcattcaaaacttgacgactatatggataaggctagtgtatctagtttgaatgacgttgatttagttttattcatggttgaacctgaggaaatgggtaagggcgatcaatacattgccaacttgttaaaagaagtaaaagttcctgttcttttagtaattaataaagttgatgaaattcatcctaataagcttttgccaattatggattcatatcacaaacttgagggctttaaagaaatactaccgatttctgctactcaaggaattgggattgaagatctgcttaaaacgattaaggaatatttgccagtaggcccacaatattatggtgctgatcagatcacagatcggcctgaatattttgtggtagccgagttaattcgtgaacaaattctgcgactgacttcacaagaagtaccacatgctactgctgtcgcagttgatcatatgaatactcatcaaaatggcaagctcttgattgaagcgactatctatgttgagaaagacggtcaaaaaggcattattattggtaagggcggtaagatgctcaagcagattgggattaattcacgtcaagagattgaaagattgcttggtgaaaaggtcaacttgcgtctctgggttaaggtccaacataactggcgttctgaccctaactttttaaagcgaataggctatgacaaaaaagaactttagttgaattactgttgtataagcgttgtcgaaagatgacgtcttttttgtatgtttagggagacaagaaaattctattcgttggataactaatgggataaaaatagatacaatagtaatgacaaagtgatgaaattttgggatctattgttttgtgattgttgttatattgggatttgtttactgtattctccacgtatgtggaggctgaaacccagtttcgaagttgattctgggtaaagtcttggtattctccacgtatgtggaggctgaaacagcagtctttttgtactatagactatttatgatattatgatatcttcatcagaatatctataaaaaatgaattttaaatactaaaggagtcatgatatggcacgtgaactaaaagaagttcagggtattatctttaaaaggcagaaatataaagaagcagatttattagccaaaattatgactaaacaagatgggattatgactctgattgttaaaggagccctgaggcctaaatcaagattaagtgcagcaacattaaatttttctattggtacttacgtaatttatacgagcgaaaagggcttaagtaatttacgcacatataaaggggcaaggcagtttgatggcttatataatgatttaaccaagaacgcttatatttcttttatttttgatttaattgatcacgcctttgtagaatatcagccaattggtaaatattatgatttagctttatttgctttgaaaaaaatagatagtggcgttgatgcagaaatgattacacaaattgtgcagatgaaaatattagcagcatatggtgttgagccacagctaaagcattgtgttatttgtggtaaggaaaaaggcgtttttgattattcgattaaaatgggtggagttatttgtagcgatcattttagtacagttactagccgaatgcatttaaagccaaaagaaactgctgtaattagaacaattggcttattaccgattgagcgattaggcgatattaaaattaatgaagaaacgaagagggctactagaaaagcgattgatcgtatttaccatgaaacgataggcctaaatttaaagactaagaaatttttagatgaattaaaactttttagttagtaaaaatctggttttaccatgacccatgtgttaaaataaaaacgtatttgacgatgatgaggatttaagaaaagtactagttcagcgaatgtcggtcggtgtgaggacatctaggaaaaggcacctctagtcatattgttcaattaagagcaggaaggatacttcctgaattagggtggaaccgcgataatatttcgtccctatgcaaaattttgcataggctttttttatggcctagcgcaggaggagattaaaggaaatggcagataagaaattaaatattcagaatatgatctttaagctggaacaattctggtcctccaaaggttgtatgattatgccttcatacgatgttgaaaagggtgcgggtacaatgagtccttacacttttcttcgtgcagttggtccagaaccatgggcagcttgttatgtagagccttctagaagacctgcagatggtcgttatggtgaaaaccctaatcggttattccaacaccaccaattccaagttgttattaagccagctcctaaggatattcaacaatattacctagacagtttgaaagttttaggtatcgatcctttggaacacgatattcgtttcgttgaagataactgggctaacccatctatgggttgtgctggtgttggttgggaagtatggcttgacggtatggaagttagccaattcacatacttccaagttgttggtgaattagatgttaagccaactatgagtgaaatcacttacggtgttgaacgccttgcgtcatatattcaggatgttaactcagtatttgatcttgaatggggtaatggcattctttatcgtgatatcttcaagcaaccagaatatgaacattctaaatatgcatttgaagaatcaaatcaagaacaattgcttcaattctttgatatttatgaagcaactgctaagcgtttattggataagaacttggttcacccagcatatgattacattttgaagtgttcacatacttttaacttgcttgatgctcgtggtgctgtttcagttactgaacgtgctggttatttatcaagaattagaaatcttgcgcatgaagttgctgtcaaatttgtcgaagaacgtgaaaaacgtggcttcccattgcttaaaagtgcagaagacaaaaaggcgggggtagaaaatggctaaagattatttatttgaaattggtactgaagaaatgccagctcacgttgtaccacgcagcgttaagcaattagctgacagaacaagaaaatttttaaaagaaaatggcttgaaatttaaagatattaagactttttcaactccacgtcgtttgactattttggttgaagatttggctgaaaagcaagacgatattgatgaagttaaaaaaggtccagctaagaagattgctcaagatcaagatggtaattggactaaggctgctcaaggatttgctcgtggccaaggaatgactacagacgatatctattttgaagaacttaagggtactgaatacgcttatgttcacgttcaaaaggaaggtaagaaagctagtgatatcttacttggtatgagcgatatcattaaggcgatgactttccctactaagatgcgttgggattcaaatgattttgagtttgttcgtccaattcactggcttgtttcattatttggcagtgatgtaattcccgttaagattttggatattactgcaggtcgtaaaactcaaggccatcgtttcttaggcgattcagttgttttggccaatgctgatgactatgaagatgcattaaaagatcaatttgtaattgctgatgcagatgaacgtaaagatatgatcgttcgtcaaatgaatgaattagttaagaagaacaactggcaagttaaaccagatcgtgatttactagaagaagttacttatttagtagaatatccgactgtatttgctggttcatttgatgaaaagtatttgaagattcctgatgaagtgctgattacttcaatgaaagacaatcaaagatactttgaagtctatgatgaaactggtaagttaattaatcactttattgctgttcgtaacggaaataaagattaccttgataatgttatttcaggtaatgaaaaagttttagttgctcgtttggacgatgctcaattcttctatgatgaagaccgcaagtatccacttagtcattttgttgatcgtcttaagaatgtttcattccacgataagattggttcaatggctgaaaagatgcaacgtgttcgcatgattggtgattacttagctaagcgttgggatttaccagagaatgtagtcaaggatttcgaccgtgctagtgaactttacaagtttgacttagttacccaaatggttggtgagtttgcagaacttcaaggtgtaatgggcatgcattatgctcgtcttgcaggtgaggacgaagaagtttcagttgcaatcaaggaacactacatgcctgccactgctgaaggtccacttcctgaaactacggttggttcattattatcaattgctgataaaattgatacaattgtaaccttctttggtgcaggaatgattcctacatcatctaatgacccatacgcacttcgtcgttatgcatatggtattgtaagaatcttacttaatgagaagtggtcattaccatttaacgaagttttaccagaaatcattagtatgcttaatggtgtaactccagctaagctacctaagagtgatgctgaccaggaaattgcagacttcattcgtgatcgtgtcaagcaatacttacaaaagaatgacttcaagtatgatattattgatgctgttcttgcttcaagtcaacaagatccaagtcaaattttagcagcagctactgtattgcaacttcaccatgatgatgaagaattcaagccagtagttgagagtttgactagaattgataacatcttaaagaaggctaaatttaagagtaatactgctgttgatgaaagtctctttgatgataacagtgaaaaagaactttacgctggcgttcaaaacttgcaagatattgaaagtttggctgatctctaccaaggttttgttcaactgcaaccagtgattgatcaatactttgaaactaatatgatcatggctaaggacgaaaaggtcaagaataaccgattagcacaattatatgcagttaatgaattagcagatcgtttaggtgacttaagcaagttagttattaagtagttaatttagatagaaaaagggtgattcatatggctggacggattcctgaagattttatttcagaggttcgcagtaacgtcaatattgttgatgttatcagtcagtacgtttcgcttgagaaaaaaggcaaagactatattggtctttgcccttttcatcaagaaaaaactccgtcgtttactgtaaatgctgataagcagttttttaagtgctttggttgtggtaagggtggaaatgtttttaaattcttgatgtataaggatgatttaacttttcccgaaagcgtcgagcgagtagctgagtttgcccatattgctatgcctaatggatatggtcataatagtggcaccaaattaaatccacttatgcaaatgcatcaggatgccgttgatttttatcatcgtgtgcttttgactactaaagccggtgaacgggggatgcagtatgctcaaaagcgagaactagatcaagaaatattagaccattttaagataggctatgcacctaaggctgataatgttttgattacttatttacgtagtaaaggttatcaagatgatgatctagcacaaagtggtttatttgttcaagctagggatgggcagttatacgaccgttttcgtgaccgtttgatgtttccattggataatgaaaatgggagaacgataggcttttctggtagacgaatttctgatgataagaccgaagctaagtatatgaatagtcctgaaacggggatttttaccaagtcaaaggtattattccactttgcagaagcaaagaaagcagctcgtggtgaaggtcacttagttctatatgaaggttatatggatgtaattgcagcatataaagcaggggtgaaatcgggaattgcctcaatgggaactagtttaactgatgaccaaatatatttgttgagacgtattactcctaatatcattattaattatgatggagatgatccaggagtccatgccgaagaacgtgctgcacgtatgtttaataaagatggcaattttaatttaggaattgtagttttaccagaaaaactagatcctgatgaatacgtcaaaaaatatggcgctgagaagtatctggaagaagtcaaaggtgccttaacgccgactgactttttcttaaaacggttggaacaaaaatataacttagataatgaccgtgaaaagattgcttatttaggtgaggccgtaaaagaaattgcacaagtgcgcaatccagttgagcaagatatgtatactgaaaaattggcgaagtctagtggggtttctattgcttcgttaaaggcaaatcttgctaaagaaagacggcgaaataatcgggcacgcaatcatgtacgtaattctcaaagaaattcacctgattatccgatagacgtacctttacctggtgatgaagacgtgcctacagagcagtcagtagttgaaaaaaatcctagtcagaccagactcttgtatttatttattcattcaactgatgctcaaaaatatatgttagaagggcaatttcattttcctaatcaggattttgaaactctggcacaggattggttaaaatatgcggaaactcatgaaaatccacaaattgatgggttcttagattttattcctgagcaacttcaaggtataatagtagatgctgaaatggcacagatgccaaaagattctacaattcaagaagttgatgctttggttctagcattaaaaagacgcaacatctattccaggctgaatgagcttcaagctcaattacaggatgctaagcgcaaaaatgatgcacaaggaattattgcaatcactcaggagattattggattaaaacggatcttaggttaataaggaggctttttagtggcagaaaaagaaactacacaaaaactatctttggataagatggttaagcaagtcgtaaaagacgtaaagaaagataagtcgatcactgaagaagatttcactgctcgtttgattaagccttataacttacaaggcaaggctgtagatcaactagtacaagagtttgaagataatggtattagcattgttgatgaaaacggtgatccttcaaagttagccttaaagaaacaaaaggatgttgaaaaggctgaattaaaggatatgtctgctccatcaagcgtacgcatgaacgatccagtgcggatgtatttgaaggaaattggtcgtgtaccacttcttactgctgatcaagaaattgctcttgccaaaagaattgaatccggggatgaagaggcaaagcaagaattagccgaagccaaccttcgtttggtagtttctattgctaagcgttatgtaggacgtggtatgtcattccttgatttgattcaagaaggtaatatgggactaatgaaagctgttgataagtttgattatcgtctaggctttaagttctcaacctacgcaacttggtggattagacaggcaattactcgtgcgatcgctgaccaagcacgtacaattagaattcctgttcacatggtcgaaacaattaataaattgatcaggatacaacgtcaattgttacaggacttaggccgtgaacctacaccagaagaaattggtgcagaaatgaatatgccaaccaataaagtacgtgatattctaaaaattgctcaagaacctgtttcattagaaacacctattggcgaagaggatgattcacacttaggcgactttattgaggataaggatgcaactagtccagaacaacacgcttcttacgaaatgttgaaggaacaacttgaacaagtacttgagactttaactgatcgtgaggaaaatgttttgcgtttgcgttttggtcttgatgatggtcgtacccgtactttggaagaagtaggcaaggtatttggtgttaccagagaacgtattcgtcagattgaagctaaggcattacgtaagttgcgtcatccaagtcgctcaaatcaattacgtgatttcatggattaattataattatctatattaaaagagctaagttttacttagctcttttttattggactggatctttacctgctgcccttagattatcttcaatgattttcattggatttaaccaagtgccattatctttccaatagtatttgcatggcgtattgtcatgctttttatcaatgtaatctttatctgtcttagtaactcctaaatgaatgtgagagccggtcagtttaccaattttttgtcccaacttgactttttgaccttttttaacataaatatcagtaatactgaggaagccttcctggtaaacttcaacatagccatcatcggaaataatccaaatataaagtcctaaacctggggcgtatttaacacgatggacagttcctgcatgcacagcatatacggaagaatgtccaacttcactaaatccgaagtcatagccatcatgaaaataactcttgctaggatagactcgacgaatgacgtcagtttcaccaaacttttgtccagatttaaatttgattttcttttcatagagcttcttaaaagggtaaccccaagtaagatgaacgacttttttctttttagcagtcttctttttcttaaccgtgtgagtttgtggtcgtaaactattcagattgttttgccataagggaatagaggcaaaagctaaaatagcaattaaagcagctaaaagtgcaaacttactttcagtttttttcattaaaatagctcatctcgctttccgtcaagcatatgttcactaattgtttgttcaaaaaatactggtaaatcatgatcaaaattgtaagctaacttttgctttttcaattctttagcactcatccaggttagtttaccttcgtctgattctttaacggtacccgaaaattgttcagctatgtagaaaaatactaaataacgttcatcattgtgatcataaaattgtttaacaccaactaattgaggatgactaatcgttaatccagtttcttctttgacttccctgacgacagaatcatgaaaagattcatgcgcttcaacatgaccaccaggaaaagtaagtcctggccagaccggatcgttgcgatcaagaactaaaacctgatctttgtttttaaccatgcacatattagttaatgtgacattttctgttctactcatgtaaaaaacccgctttctgtgacgattatatcaaatagtagcaaaataagactatgaaatatgctaaaatttggttaaccatatcttttatggaggaaacatgaatttaagattaaatacgttggcaaagatggtagatcctggcagtcgagtggctgatattggaactgatcatgcatacttgccaattgaattagtaaaaaatggcaaaattgattatgcaattgctagtgacgttgcagagggccctcttgaaaatgctaaaaatgatattgcagcagctgggttaaccgagcaaattgaaactcgcttaggtagtgggttagaaaccgttactcatgctgatcagattgatacagttgtgattgccggaatgggcggcaagttaatgactgatattcttgatagagcttggagcaaagatgcacaatttaaaactctggtactagaacctaatataggcgaagcaggggtacgtaattggctgatgatgcataattataagattatctcagaaaaattaattgcagaggctgggcatacttatgaattaattaaggctagcttaactgaagaaaagcatgagatgactgaaaaggaaatcttttttggcccctttattgtacaagaaaagaatccagttttttatcagaaatgggaaggccaactcgcttattatcaaagattcctggttaatttgaataaagcaagaaaaaaagacgaagatcgaatcaatgaagtagatcatgatattaaattaatcaaggaggaattggagaaatgaccaaagtaaaagacattgttgcgcgtttgcgacaagattttccggaaaacattgcttcacaaggtgatcctgttggtatgcaaattggatcaatggaggctgatgttaccaaagtaatgactactttagatgtacgtccccaggtagttgaagaagctgttgaaaaaggggttgatttcatcgttagtcaccatcctgtaatgtttagaccagcacaaaatttggattttgcgaatgcacaaaacgcaatgtatggcaatattatcaagaatggaattactgtttattcaattcatactaattcagataaagcccaagatggatctgctgattggcaagcagaggaactaggtctgcaagatgttgaaccattttgtctggatgatgatggaattgctatgggtagaaaaggaaagttacctagaacaatgactgcttatgattttgcctattatgttaaagaaaaaatgcaaattaaaatggcacgtctgattactgcaaacaatgaaaagccaattaccagtgtaggatttatttgtggggatggtggtaaatattggactagagccttagatgaccatttagatgcttttattactggggatgtttattatcatgtaggccatgatatgatttcatctggtttaactgttgttgatcctggtcattatactgaaaaactatttaagtacaaggtctatggtcgacttaaaaagtggaatgaagaaaataactggaatgttggaattgagctttccgaggtttctactaatccatttcaagacttattttaattagaaagagagttatatatggaatatcctaatttgttacctagatttttaaagtacgttaaagttaattcgcgttctgacgaacattcagatcgctttccatcaactgaaagagaagaaaacttccaaaagaatgttattatgaaagatttggaagaattaggtttaagtgacattcactacaatcaaaatgctggtagtgtaatcgctgaaattccgtcaaatgttgattatgatgttccagtaatgggctttttagctcatagtgatacggcagactttaattcagaaaatgttaaaccacagattcatgaaaattatgatggcgaaagcaaaattcaattaggagattcagagttttatcttgatcctaaagtttttccacatttgaagaattataaaggacaaacaattattacggcctcaggtgataccttacttggtggggatgacaagtgtggtgtgtcagaattaatgacttttgcggaatatttaatgaatcatccagaaattaagcatggtaagattcgattggcctttactcccgatgaagaaattggtactggtgctgaacactttgatgttgaagactttggtgctgactttgcttttactgttgatggtgaagctcctggtaagttagattggggtacattctctgcggcacaatttagtcttgatattcagggagttaatgttcacccagctgttgctaaggggcaaatgattaatgcaattcaagttggaattgactttcataatcaactgccagaacacgatcgcccagaacataccgatggacgcgaaggtttcttccatctaatgaattttgctggtactgttgataatgctcacttagattacattattcgtgattttgaacgtgatgggcttgaagagcggaagaatttggttaagtcaatcgttaagaaaatgaatgatgaattcggtactgaacgaattacacttaaaatgtgggaccaatattacaacatggccgatgaattaaagaaacatatggacatcgttgacttagcgcgcgatgcttataaagcagaaggtcttgaagtcaatgaagacccggttcgtggtggtacagatggctcacaattgacttatatgggcttaccatgtcctaatatttttgccggagaagaaaacatgcatggtcgttatgaatacacagttcttgagtctatgtggaaagctgttgacgtgatgatcaaaatggctgaattaaatgctgaaagagctaagtaagtgaaacatttttgactaaaaatatcaataattctatttctgatctaatatgagattattgatagattaggaaatagggtaaacatagttaataaataaaaattatgcactaatactattaaaaataaaagatagtttataattaccgtcattataggattatagactatctttttgttgtacttttaacttttatgaacttgtgaaacaaagtgattaaacttagcccttgcaaaaagtgactaaagtaagtattatagttagtgtaatagattaataatacagtgcaaaataggagctgagtaaatggaatttaaagataatattcctatttatcttcagattgaacaatacttgtatcgtcaaattgctttaggcaagttaacagctggtgagaagattccttctgttagaaaacttgctctagaattaaccgttaatgttaataccgtgcaaagagcactacaacagatgaacagtcaaggtattctttatactaaacgtggcgaaggtaattttgttactgaagatactaaactattatccgaaaccaagcagtcattaattaataatgaattagaacagtttgttcaaaatatggaagagtttggaataggaaagaacgagttagtttcaacgttagagaattatttaaaaaatggtggggatcagaatgaatgatttattagctattaaagatgtaagttataagaaaaatcagaagcaagtattgcaagatgtgaacttgaatttagctcctggcaagattgttgcgttacttggtgaaaatggtgctggtaagaccactttgatgcgaattattgccggtgtagctaagaattacaaaggcgaaattaatttagagggggcaacaaaagaggcagaaagaaaggctaagttgtcttttactgatggtttaactggcttcagcgattcaacaaagatcaaggaagtggttaaattttacgcaacgatttttcaagattttgatgagaatgaattcgatgagctgcgtaagtttatgaaattagatcctgaaatgaagttgagtcagttatcacgaggaatgcgtgaaaaattgattattgctttaacatttgctcgtaaagcagatttgtatttacttgatgaaccttttggtgggattgatgcaatggctcgaaagaaaattattaattccatcattttgtggaaagatgaaaaggcaacgattttaatctcagatcactttgtcaatgaaatttcatcattgcttgatgaagtggttattgtaaaagatcataccgttttggaacacaagtcagcagatgacattcgtcaaacgcataagtcaatcgaagaatactatgaaagtttttatgcagatgaggatgatgaataatgactagttttaacacattgtttaatcgaatgtttcaagaaaaaagcaagtcagtctatttaatcttcttaattcaagcctttgctagtttatgttttacaattattggttttgtttcggaaaatggtacaccagaatttgttaatggaaaagatactagttctgtcaatgtgattgttgcttttctcgctgtatttgcagtaatgatgctgataacgtcatttatcgctgattttgtttattggattatttcttcaatcaagaatgaaaaaattaatcgcagtcaaacttggcgcttgattccggtaactgatactaagtttttgcttagcaattttgggacagcatttttaacttatatttggttaggaattttagaagcggtcacgataatcgttacccttttgccgatgttgtctgatcaagatgtgcgcaaagcaataggtcaggctagcatccatctttcagcaagagactggcaaacaatgctcggaagtttgctgctaatcatttttattggctatgcttggtacgcaattgtaagtttgcttaacctagcaagccgcagcattattgattttttgccaggtggctcaagtaaagtatggacctttattattagagtaattgtaattattgcgattatttggattttaggccatgcggcaacaattatcttttcagtcttaggaaagtttagtccttttatggtcaacagccaggatattaactatgccactacgattcttcaattcttggtctttgatgttgtgattactttgatcgatatcttgcttttgaataaattcgtagaagcaaaacagaattaggagttttttatggcaaattttaagaccttgtttaagcaaatgtttgtgcaaaaaaggcgctacgctaacttagttttgttattacaagtttttgcagtcctttttttgctggtaatggctctgttagataaaagcaatttagcttatctcaacattagtaaggacagtaattggctagatcgtttgcttagtgcaggaatgctcgaaacgccgattgccgatgtgatttttgttggtctgctttgctggcaaaatgaaaaaatcaacctcagtcaaacttggcagctagctccagcttcaagtgtcaaaatctggctgattaatatgctttctagtttagttgaatgtatttatatttttgtaattcaagtcattttaggcttcgttgctgctatgattgataatttaagtcatcattattcactgcttcatgacttagttgatgctaaagttacttgggcagatgctagtttattaattgaatttctattgttcttaactggaacggttttagttattatgacttttgtcagttttgctaattttttgacgaaagtaattgttgatcaattgccagttaacaataatattgtcattaagttatttgtgatggcagtgattgtgattattgcaatcttgattgctgaacagctaaacgaacaaattactgctatgtatttgcatcgttttgccaaagaagcagcatatgatccattgggtatttcagtggttgagtactttgcaggagcaattgttttaggagcaatcgacagctacttaatgagtaaatttgtcgaacctaagataattaatcgttaattgaaggggaggggtagatagtgacgaatttttggaccttgtttaggcaaatgtggacgcaaaaaagaaaatttatttatttggttttcttaattaatatctttgctgtagtatttttatcaggttattttcttcttttcaaaaattggaatggtctagcaaatctgccgtctaaaaatttagggcaattctggcgcaataattttgtctatgtgactttatacattgattttgccttttgtgcgattacatgttggcaaaatgaaaaaattaatctgagtcaaacctggcatttagcagctagcgatgaacgaaaaacatacttagctaatatatttagcagtttgctggcatgtggttatttcttcttgctgcaagaaatcgttaatagtctgttgctgatccctagttgcggggcagacagttttgctcaagcatttcgtgagtttggtctgtatccaattaaaacagttcccggcgttgaaataactagcaatcgaatgcttgcttttcattggttgtttatcattttgataattttaatcatttacttctttgtcagctttgccaattttagttcgcgagtaattactgatttcttgccgtttaagagtacagtttgggctcgcttgttaattatcgcaattttggtaattgtcgcagcttactgcggcatgatctttatgtctaagttacagggctttgttgataagagtccaaatttacaagcaaccgatccaatctggttagatgatttatgcttgtttattgttagccttgttttcggtattttgaatctagtattcgtgaagaaatatcttgaaccaaaaatagattaattaatgcaaaaaaagagcttcatttcaatcaagaaatgaagctcttttttgtagttaactaagcatttgctgacatgtaatcataaagctgatttacttcttcggctgtgaattgtccatcgccaactttcatggcgtgaactttttcaactgagaggtgactagcaaaggctaggtcagtgtcattaacatggtgttttacttgaaaattgataattgcatcagataattcttcttgctcattcataataatttctccttaccctctaattttaatcaaattggaataaaaaataaaattttttgcaatttcattgattaaaatgttttccattgcgtaaatggccaatacctgaagacgactcggccaactaatgcgctgcgcttaacaaaaccgaagtaacgtgaatctttggaaacatcgcggtgatctcccatgacgaagtaactatccttaggtactcgcttttttaaagtgaaattgttagtatagagttcacctaatttatgtgactttctttggtagccattatttaaatatggttctgcaatttgtttgccgttaatgtaaagcttatcatttttagaagtaaccatatcaccaggtgtaccaataattcgcttgatatacagagcacctttttggtctggtgcttttagaatgacgatatcatttcgtttaggcgtaaaatgacgtacagcaatcaaacgatcgccattctcaaatgtgggctgcattgatggaccagatactgtttcatttgataggaaaaaactaaaaataaagtagtaaattcccatcaaaattgcaaacataataattatgtctaaaacaaagcggccaatgctttcatcatcatttctctttttggtttcaaccatagaatatctcctttgcttgctagtcttattataactgaattctccgccgttgaatggtaaaatcatattaaggtgtttaagtatgacaaaatttttgacgaaattaacaaaattagagcaagagataaatcatactgcggttaaacgacaagttgaagaaatagcattaattgatagttatgtacaagcaggtaagccattgaagcgggcaccacgcagattaggtttattgccagatgaatttgaagaagttttagttgaggtgggaccagataaagaaggggccttaagggatttaaataatttacttaataattttcggcaatatctctctttaatatatggcatctggtctctgcctaatattcagactgcgcagttaattaaaaataagctgcatgtacaaacagcgttagaaatcatggcaggcaacgcgtattggtctcaagctttgactcaggttggaattaaagttcacagtacagactcattagagtgggccaagacgtcgaccactggagctaagcctttttatccagtagaagatttaccagctgaccaagcaattaagaagtatcacacagttaatctagttctatgttcgtggtcaccaaatttcggtcacggagatttagaaactgtggcagctgggcataagtataatccaagttgtcatttgctctttgttggtgaaaaagatggtgctactaattcaccagaattttggcaccaaaattggtttaaaaatagtgcagctttagacgagattaatcattccttgcaaagcttcgattttattaatgaacaggtatttgaaataaaaaatgaattttaaaaagatatttttgttactgattcttttattatcttttttaggaattggaacaatgctctccaatattgaatctaattatgctgacgaattgctggaagcacacggcttaactaataatacccgctattttagaacagatagtgatgataagattagtactttcctaaaatatttggacaaaaattatgcgaatcatcaaattcaactgcatctagataataattatgaaaaaaaacaagtgcttgtttgggctaatcatgccgttactggcttgccaactgagagtggtcgctatttttcgcctgatgattttaaaggacaggtttcttttgtggtgctggggccaacagttaaacttaatttattagatgtgcagaataataaatatgttattttaggcaaaaattattattctgttataggcgaatttaaggactatccacaggtagaaatggataaatattatctaagtacaggaattgatcagccaactgctaaagaccagctcaagaattatcgaattgtagtagatgcaacacctgcagtgattgaaaagattgctaagcattatcatgctagtttgcatattccgtcttttgttcaagagcatcatcgagatcgtttatctgtcgtgccggatattttaatgttagttgtttgcctattggtcggaatgatcacaaatatgttgcttgcaataggaattaagcgtcaggctcgtttaacacgtctacacgatgatttgctgcgcaattgggtaattaaccgcagcgtacgtttatttttaatagaggctatttttgcccttgctacatacttctttttaagatggcatgccttttattcaacatatggttctttaatagttacattaatagcttcctgggttgtaattgtattggcgttttgtgggatggtctattacttagtgagaaaggacaggaaaattgctaaatctaccaaatgaatttaaaactaaatatgaaaaattattaggtaccaaaaaagcacaagaactatttgcggcgatgaatgaagagagcaaaaaagcttttagaattaatacattgaagcctactaaggtttcatatgagcttactgattcagtaccgcaaataaattcagcctattatggtgaagtatcgggggaagatcctgagtgggtaagcggtagtgtttattctcaagatccagcggctatgtttcctgcggcaattagtggtgttcggccaggagagcgcgtgctagatctgtgtgctgcgcctggaggaaaaataacagcattaggagaacaattgaagggtgagggccttttagtagctaatgaaatctctgcaacacgagtaaaggcactacgggaaaatattgaacgttggggcatcagtaatgccttaattactaatgaaagtccagaaaagttagttccaattttttcggaattttttgatgtgattttagtcgatgctccatgtagtggtgaaggaatgtttagaaaaaatccggaggcaattgattattggtctcaagactatgttttaacatgccagaaccgtcaaaaagagatcctcaatgaagctgttaagatgcttcaacctggcggacgcttaatttattcaacttgtacctttgcaccagaagaggatgagcagattgttagctggttaaataaagaatatggttttacaattttagatacagggatacaaactaataagattgatgttggacagcctgagtgggctgatgggaatcctgatttgactaaaacattacgcttttggcctcaagatggtataggtgaaggacaatttgtggcagttttacaaaaagtaggtaaagctagaattgaaaaaaagagcaaaaacaaaaaagccaagcgtgatccgtggcgcttaaccaaaaatgatcaggaactagttggtcaggtaatggatcagtttaatttaccagttgctttaagtgactggcgtaataaagcaaaagtccgtaatgaacatgtctatattcctgcaatcagtttgcctgaaaaaagtaagcttcatgtaattaataatggagtcgagttgggtatattaaagaaaaaacgttttgaaccaggacatcaattggcagaagtgctaggtaaggtaaagcaagaacgggtttatgatttaccgacaattgaagaataccaaaattatttgcacggtgaaaccgttaaagtggacagtgatttgcggggctttgtgttagtcagctatcaaaaattaatatttagttttggcaaaatcgctggtaatcaagtattgaagaacttttacccaaagggattgagaaaatgataaaactaattgcgacagatatggacggaacctggttaactgaccagaaagactatgataaagaattatttttgcgtgaatttgcggaaatgcaaaagcaggggattaaatttgtagttgctagtggcaatcaatatgctaacttaatgactcgttttcctgaggttttggataaaatttattttgtagctgaaaatggggcattagttgctcaaggaagacaaattttgcatgttgactcgttaagtgatgacatatatcaaactttattaaaaataactactgaatatccatatccagctgtagtgatggggctagtaagtgcttatgttaaaaagagcagtggacgagcttataaacaagaaatgaaaaaatacatggagcatattactgtagtagattcttttggagaaattgatgatcagattttcaaggtcagtctgacagtgccagaagataaaatgtctaaaattttgcgcgaattaaaagaaaaatatccggaggttggttttgtttctggtgcagcagactcgattgatatgcaaactaagggaatgaataaggcagtaggtctagcatatttgagtcaaaaattagggatcaaatcaagtgagatgatagcttttggcgatagcggtaatgatgtaggaatgctgaaatatgtaggccgtagttttgctactgcaacggcgttgccagaagccaaacaagctgcagggcaaattattggttcaagtaatgaaagtgctgttcaaaaagaaattgctaaattgcttgaaattaaataaggaaaattatgtaaagtaaaagcactagtaatcattaactagtgcttttactttacagtaactgatcgatttgagcctttaatggtaaattatagtatttttttatttgtaccagggatgctaaatcttttttgccgtaaacagcaattaaagcagccaattcatttttccaattagtaattaattgctctaatccagtactaccattttggatgtattcttgtaaaaaaacatttgaaataccaacaaattttcctcctagagctaaaccttttaaaatatctaggggattacgtactccaccagaaacataaaatttaacttgctcttgccatgccatcagagcagtcaccacagtaggtaaacctaaatcttctaagtatgaaacgtcactggcattacgtgcattctcaatctgggcaaagtttgtgccacccgaaccggcgacatcgaagtattcaatgccatttacttttaaaagatgaatacttgtttgatccaatccaaaaccgacttctttaataataatgggcaaatcgatagcggtacgaattgctttaattgaatcaagccaacgaaagtcacgatcaccttcaggcatggcaatttcttgtattgtatttaaatggatctgaagcgcatctgcatttaattcttggataatttgtttaattgcagagattggtgtttctggattaacattaacaattagtacaccatctggatcttctgctctggcaaccataaaactgtctagttgatcagtttccttagctaaaatgctggcagatcccaaagctagggcaatattttgctgctgggcaacctgtcccaatgcttgattaatttgtttagaagcagctgagccaccagtcatagcattgataaaaaaaggcgcagaaacatttttgccaaacatttctgatcccagaatagttggatcgacttttgtttcaggcagagcagggcgcaacaaatgcagttgatcaaaactattatatttttctttattaaaaaacatctgagctaacttcagatgttcttcttttctttcagatctaatcgacatagaactctccatcaatgagccatgataatctggtgaaccttaaaattaagaggcataattccattatggcgccattcgctttcaagtgcttcaacatcggtattagcatctgtaatcacaatgccacagtcaccattaccagcaccagaagttttagcagctccaccaaaattttctgcaattttgattaattgcgataaacgtggaatttcaatggcaatttggttaattttggcaaagtgctgcaacaatttacggttagcccgaatttgttgtttgattaaagcaatattgtttgcttcgaaaccttgaaccatctttaaaacacaagctctagaagctgctaagaaatttttatattccatattcaaagccgccttattagcgttagtttcatcaacgaggcgtgaagttgatgctggcttttgactccaaccaatcatcagtttcatatctttaggaggagttagtaattcaacttttaagccaggccaagcttcattaacgacttgaactaaagtcttattagctaattcttgctttaaccattttttgtcaaaagtttggtaagctaaccagccgccatagacactagctgcaatgtcaccagctgagccatttccttgaactgaatagtgtgaaatagccgataatttataaaccagttcattgctcatttttacgccataaaaacgcaagatagctttaactgtagctactgtgacggctgcacttgaacctaaaccatattttttaccatctgcagaatctaagtctgaattgacgtgtaaatcatagactttcatcttgatattttgctcaatacaatattgttcagtaaatgaaatagctgacaaaatatattcaaaagggttgtcacgattatcgattaccatttttgagccctgacgaacccaatgaatcgaatcctgtgagtattgcttggagtgaattaagccagttgcccctttactcttagtgattgacacacgtacaaattggttaactgctactaaaatagcaggacaatcttgctctaatactgcatattctccggcaatatataactttccgggcgctttttctgttatcaaaagaactaaatcctcgaatctaattaacttttttaattacaactagtccaaataagtaattccaggaccaaaacttgcattcactatattaacattattaaattcggacgaaaagcgttgaatgatatctttgctatttcttaattggcaaagtaccttaatatttggtcctgcatcaattgtatagtaacattcaattccttcagtacgaagttgttcaactaatttaatagcttgaatggtttgcggctcaaagtaagtgaattcaggctgtgcagttaaattaattgcatgcatttcatttgcatttaactcagctaactggcctagggcagtgaaatcattactttttatagctttgatcatttcatttaattctgaattgttgcgttcaagccagggcctgaaaaatggagaagattgggcatctttcataccataagtcgaagaaatctttttttgtttggtatttaattcaactgctaaaaggtgaagatccatcgttggtgtttcatctagtgcatatgcgtaagatgtttcgtcgctattacctttttgccaaacagcaaaaccgccataaacggagcggctggcagaaccagatccaatcctggctaaacgagataaatcttctagatcaatgttgatgtcatagcattgacaaaaagcagcagctagtgccgcaaaagcagaactagatgatgctaatcctgcagaagtagggacgtgattgacagatttaacgattaaattgccagtgacgtgaaaacgagcctgcaatttttttagataagcaaaaacacgttgactagctgcagcagtttgctgttgattatttaagaaaaattgattttcaccatctgttttttcaacgctagtatcagtataaaaagcatctaaagtcattgataaactagacattaaaggaagacgtaatttgtcgtcagctttgccccagtacttgattaaagcaatgtttgtatgtgctcgtgcggttctattcattaaatctcctcaatccagtagtcactaattaaatctttacatttagaggcaatttcttgggcgacagtttcgttatcgcacaaggaaatagtaatgccgccaagacctccgcctgataatttaaagcctaaagcgttatttgacaaggcaattttttgcagttggtcaattttatttgttgaaagatcaaatgagtgcaaaatttcttgtgcttcattaaaaatctgtccaactgcttgacgatcgtgcttgatccaagcttttttagtaagatccgctaattcacccaagcgagctatttttttcttggcatagtcggacttttcaagcatttttttaactaaaaaaacagcttcctttgtattgcctagttgaccagtatccatgattaacagggtagctcctaatttggtttgtaatattttaggccccatttttttattaaaaaaaactagataatctgaattaacagtggctgcatcaagaccagaagctttaccatgattgatcatttcagcatgattagttacagtcataatttctttttcagtcatattcagctgaaagaattggttcattgccctagtggtacctaatgcaacagtagcacttgaaccaaaaccatgttccattggaatttcaccagtgtatgtaattttaagtggatggttattgccagcctttttttgcatatgtttaactacgtattttaggccatcatattctgccggtgcttcaaataatggaccgtggtagcgagcggtatccatccacatttgagaagcagattcaacagtagttttaatgtgtaaagccttaattggcatagctaaagcatcatatccataaactactgaatgctccccaataataattaccttgccatgagctaaatagctgcttttcatttttaatcatccttaaactagatttatacaaaagattgcccttgctatgataaaataaaaagcaaggagtgcgaacaaatgatcaaaattcttacaggacgacaaaccgacccattacaagaaaaaattctggaagaagcagttgaaaactatcagcaacacccagaacaagaaacttttatcatcgttcctaatcatattaagtttaccacagaagttagggcaattaacaaattagcaacaagcaaacaacaaactgagactgcagttaaaaatttgcatgttttgtctttttcgcgtttagcttggtttttcttaaaagatgccgagcaaggattgcctaatcaactagatgatgcagctagtgcaatgctcttagctcatattattgagaacaaaaaagatgaattgactatttttgaaaatgttaatgttaattctggattagtaaatcagctttatcagacaattttgcaagtctatgacggaaatttagatttagacgagatatcagaggataatttagatcaagaaactaaaaataaattacatgatttgcggattatctatgatgcctttattaaagaaattgcgggtaaattctctactaagaatgaggttcagctgcaactaaatgaaattttagctaaaagtaaaaatttaaagcaagccagtttttatttctgtgatttttcacatttttcattacaggaaacactaacgattaaaattttgatgcgtaaagcaaaagatgtaatccttgcatttaaaacgcgcttaggtgaaattaattctagtgcggaagaaggagattatgattatgtaatccagcaaactattaagcgcttaacgctgttcttacaagagagaaagatggactacgtgacagcaacttttccgcttaattcgcaatcaaatggtcgtgaaatattaaatagtctttggacggagacaattcctaaagttgacgaattgaagcaggtacaattagttaaagcagactctcgatatgcagaggcttattttgtagcgcggactatttatcaacaggtagcactaagcaactatcgctatcatgattttttgattttagctccaaatttaaaggaatacgagacttatttgacgccaattttacgtcaaaatcagattccattttttaatgatttacaacaggaaatgaagtatcatcctctggttgttttaattgaaagcttatttaacttacatgagaatccgtttcaaacacaaaatatgctagccatcctaaagacacacttgttaataccttcttggtataaggaagaggcggagtatattcatgatgttgatgaactagagaattttgttctggctcatggtattaatcataatttatggaaaaaacactttgataattttgtgaatgctgaagtgatccgcttagacaaaatggatgatgaagtagctaagatcgatcgtttgcgcagctacttggttgataagatttcaacatttttcaaaataatagagcaagaaaaagatagtcaaaaggcgttaacgatattttttgagttcttaactaagaacggaattgccgaccgattagaaaaatggcgtgatgaggccaatgaagccggtgatttacagcaggcgcagcaaccagagcaattatgggatttattaatgcagctgttgcaagactatttagcaattaatcctgaaacttttgatttaaatgaattctttaatatgttaattagcgctttccgagaagcaaatttttcccaaattccttcaacacttgatgcggtaaacctttctgaaatggggatggtacaaactagcggctataagcaagtgtttatcattggcgctactgctaataatttaccccaaattcagaaaatgccaggttttttaactactgaaaacttgaatcagctacaaaatagttttaattcagaatcttacttagaagatagtcaacagcttaataacttagaccaaaattatcagtttggtttgtcgctagctttagcacaagatagggtatatgtatcttatccagtacttaatgcttcaaatgaagagcttgatccttcaatttattatcaacgtttaaaggattatggtgctcagcaatttgttcaacatgatttgccagaaaagatgcaggatcttttgtctttcattactaaccctgatgcaagtttaggctatttaacctatatgaattcaataaattcaggtcttgctgtgcaagagttattaaaaatcacacaggagcaactacctcaaaaaacgaagacagtgcttgaagcaagtgattttgataaccagccagaaaatattggtcaggacttggctagtcaattgtatggtcaaaacttgaattcatctgtgtcacaactggaaactttttatgaaaattcatatgaatatttcttgaattatgggcttaagctgcggcgacggtttgaaaatgaatttgatgttattcaggctggaaactattttcacgagacttttgaccgtttagtgaaaaaactaaacaagcagcataccgacttagcagatttaagcagcatagaactggaacaaatgcttaattcggtgcgaaatgtgatgaaggatgaaggaaaatattctcaattaatgaatgatccttttaatcaatatcttttcaagtgtctagaccatactacttctaaggtagctcataattggcggcgctccttgaaggaaaccccgttacgggctaagtattctgaattaagttttgggttaggtgaaaaaatcaaaggattaagcttaaaagtgccagatatatcaggtcaacataaagttgatttgcgcggtaaaatggaccgggttgatttggccaatttcaatgataaggatcaagttttagcccaggttattgattacaagtcatcagctaaaaaatttgatcttgggatgttttataacggaattgctttacagatggtttcttatttggatgttttgactaaaaatgatcaattttttgctggaaaagatcgtctttcattattgggtgctttttatcaaactgttactagacaattagaacgtttgaatagcaataaactaattgatagtagtttaaatttgaaaaagggagcaactgatagtaagcccaagctgatgtatactggcttaatcagcaatgatccagaaatcttagtagaagctgagccattacttgatgatcatcctagctattcttctgaactgtatactggggttaaaactaaggctagaggtggctttagcttgccacgtgaccgcaactttagtgaggaagaaattgaattactgctagaatacgatgagtatcttattcgacaagcatcaagccaaattttatctggaaaaattgaacttaatccatatcgttatggcaaagcgaagaatgccttaacttattctgattatcgtgatgtcttcttttttgatgcgatgctgcgtcaaaatcaatatcatgaaataaacaatctgaataaaaaagaattaattcttaaaatcaaagagaaattaggaaaggaacaataaaattgtctcaatttactaaagagcaacaacaagcaattgatgatcgtggtcatgatattctggtttctgcttctgcgggtagtggtaagacaactgttcttgttgagcgcgttttaagggagattctttcgggaacccaagttgatgaattattagtaattacatttaccaaagcagcagctgaagaaatgaaaactagaattaaacaggcattatcagctgaattagcaaagccgggatctaatcgcagatatttacgtgagcagctaaatcaagtggatactgctaatatttctacaattgatgcattttgtctagaagtaatccatcgcttttattactctgtaaacttagatccaagttttagtattctaactgatgatactcaagctgcattgttaaaagaacgtgcattacgtgaaattgaaggggagtttctagaaaagaaagacgtaaattttaggcatttttatgataactttgcaggggatagagatgcggatagtccgcgcgacttgttgctggatttgtatgattttgccatggccaaacctgagtatcgctcatggttaaaaaaattggttgatgtttacgtggttaatggcagtatcgtggaatctgatttgtggcaaaaacagattaagccatacttgcttactagtattggcgacttacaagggaaaattaatgattatttagaaaatccagtaatagaaacaaaagagctagctaaggctaaggaagcttttaccttgtttgcacaaaatttagatcattttgtttttgctttagaaaatgatgcagactacgataaacaacgaaaactattacgttcgtgtgtttttacagcgaattatcgtaagtcaagtaaatgggatgaagatgttctaaatttttatgaagacctacaaaagttaaaagatgaagcaaaaaatttggtttttgatacttttacttcattttttgctgttgatgaacaagaacaaattaaagtcatgcagcgcggccaaaagattgttgctgcaattgctaaatccgagctagccttgattgatcggtttaataagctgaagcgcagtgaaaatttgcttgactatagtgatatggaacaattggcttatcagattttgagtcaagatacatcgaattctcaaatggctcgtgaattttatcaaaataaattcaaagagattttgattgatgaatatcaggatattaatgctttgcaagaaaatatcatccagcaaatcaaaaataaagataaaaatacgcttttcatggttggtgatgtaaagcagtcgatctatggctttagacaagcagagccaagcttatttttgaaaaaataccatgattttgccaatgatgataataaacaaaccaaaagaattctgttgtcagataatttccgctctactgagccggttaccaaaattgtaaatcaagtatttaaaagtgtgctaagttcagattttggcgggattgactatcaaaaagaaggacaattaatttttggtgctaagtattatcctgaaaacactcctaaagctagtgaagtaattgttcatgaaaagaaaaatagcagtaatgaagatgaaaatgagatagatttttctgaaattcaaatggttttagcacgtattaagcaactaaaagaagagcgtgtacaaatctttgatagtaaaacaggaatgagagagttacgttacagtgatattgctatcttgactagaagtcgtagtgataatttggaaataatgcaggaatttgctaagcaggatataccattatttgtaactgatgcgaagaattattttcaaacttttgaattgactgttatgatgaactacttaaagatcattgataatcccgatcaggatattccattagtttcagttttacgttcgcctttgtttaattttggtgaaaaggatttagctaaaattcgtatcaagagtaagaactctactttctatagtgcattgacttcttatgtaggtgtaggagatgaattaagtactcgaatcaaagattttttaaatcaactagctgatttgcgcaagtttgccacggcacatcgtatttctgaattgatttggagcatttatgctaggacaaatttattagagataatgaccgcactacctaatggtgaacagcgacgagttaatctagaagctttatatgaacgtgctgcttcatatgagagtgcagggttcaagggattataccaatttatcaattttattaatcggatgcggcaaagtcagaaggacttggcacagcctttattaactaaagaagctggtaatgcggtcagattaatgactattcatggttctaagggactagaatttccgatcgtgttttatgtggggatgcagcataaatatcaaatgcgtgatttaaaaggtaactatgtgattagctcagatagtataggaattacgctccgtgaagaacattatcggattgactctttagttaaagcgatgggaaatgtaactaaaaaaaggcaattattagaagaagaagcgcgaattctttatgtagcattaacgcgggctaagcagaaattaattttggttggcgatgttcctaatctggataaacgagttaaagaatggtcgactgaactaaatcagattggtcaattatcattagcagataagttatcttccactagtccattgagttttatgggacctgcgttggctttagatcgacacctagctgtgaaaatgtctgatattactaattcgttggataagagtcagtcgtttttatatattaattatgaaaatgctaacggtgaactacctgattatcagaaagcggagacaagtaatgataaaacgcaaagtaaccttttaaatcaaaccactaaacggctttatcaatttaattatccgtttaaagatgctagtgaaactacagcttaccaagcggtatctgaaataaaaaaagcattcaacgatccgatcgagaccgaattagagaatgcccacttattgacatcgactaatcgttatttacaaccgattgatactaaacctaatttcttgtatcaaactaagtttactggtgcagaaatcggaactgctacacacatgattttgcagtattatgattatcaaggcaatggtgctgaagatcaactagaagtagaaattcaagaattgattaagcaaaagaaactgaatccagaaattgtttctagtttaaagaaagaccaaattgagtggtttgttcatagcaattttgccgaggaattttggcaaaagccagagaatttaaagcgagaaatagatttttctagtttaatctccgctaaaactttgtttaaaaacttttcagatcctaatgccaaaattttggttcatggtacaattgatggctattttgtcaaaaatgatggtattattttgtttgactacaaaactgaccacgttgatcaatcgcatttatctgaatcaattgaattgattaaagaaaaatatacaggtcagcttagactatatgaacaagctatcaatgaatttagtcaaaaaaaagttattggaaaatatttaattctgcttgatgctaaacaagcggttgaagtgaaatagaggaaggaggaaattatggcaaaaagttttactaaagatacatttgctgtagttgatctagagactacaggaacgcaacgtgagaatgggcatcatattattcagtttgggtgtgctattattaaaaatctcaaggtagttaaaacttattcatttttgatcaatccgcatcgtgaaataccacaatcagttgttaatttaaccggaattcatgatcaagatgtagcaaaacaaagagattttgattattatgcacccaaaattactaaaattttgcaaaatactgttttcgtagctcataatgttgactttgatttgccttttttgaattatgaactagtgcaacatggttatgaggcacttacaaataaagcaattgatactgtagaactggctaagattgcttttccgacttttccatcttataagttgagtgatttgacaacacaattggggattaaacatttagatccacataaggcagattctgatgcttatgggactgcagttttattgcttgaaatttttaataaattagaaagtctacctcaagctacactgaataccctcagttcattatctcatgggcttattcgggatacctcttgggtgattacaacgattgcagataatttacgtcaagaaaaacggcctttaggtaaagaatatatgcaagtgcgtaatattattctgcaaaaacaaaatgataattctgaagcacatggtgggaatgctaaattcccaaagactgactcagagaaacaaaagctatttaaagatcatttacactttcgtagagctcaagtcgacctaattaatcatttgcatcagtttattaatgatccagataaaagggcgatgctaattgaagcacctaacgggactgggaaaactttttcttatctttttgcttatgcttatcagctttattctggtagaaaattagttgtagctacaccaactaaagtgttgcaagaacaagtgattgaacatgaaattccgcagttatttaaggtgattaagttggatttgactgcagaagtagttaagtcaagtagtcgttaccttgaccttgacggatttgtacagacgatttttcaaggtacaccgaataagcaaaccttgatattacagatgcagatactggtttggctgactaagactaaaactggtgatttagatgaattaaatttaactaactataatgcaccactctttgcacagattcaacatccaggggatgcaagagtaggtagccgttttgcaggggtcgatttttggaatttagcgcgtaaacgacaagaagaagcggatatattggtgactaatcatgcttatttggctaaccactatatggatacaatttggggtcagaatccgtatttagtcattgatgaagctcatcgtttcacagacaatgtcgtaagttcgcgtaatgattctttgcgttttgaagctttgtggggagttttaagtcatctccgtaatttgctttatttctcagatgaaagtgttgaagcgcaatttaatgatgatgtgcagctgaaccttttactaaagaaaatagatcctaaaattttggaattaattcagttaattaatgaattacaaaagcaactttattttcaaagagataatgctgttaatcggacagttttagctaatggtaatctagaacttagttttcaaggaaaaagtttatttggcggaaatagcaagtttaaagcgattttacctaagttccaacaaaaattagaagaggttagggacttaactaatcaggttttatttgaattatataatgaacaagaacgcatgctggctaatgttgaggtattagtcaatgagattacggaacaaattgatcgcctagattattactctgaaaagggctatcaattggctgatttgctttctgatcaaaaaggtttagagcaagatggctttattttgatgattactaatcttgatgatccactaagtaccaatttagactggttaatgcttgatgctggtgaagtattaaaacaaatctatagtcgttttgaccatattgccttcgtcagtgctactttaaccagtaatcgaaattttgaatatgcaatcaaccagttagctttaacagaattacatccggttgaatatattggtaaaagtacttttaatataaaaaagcatttacaggtactggcagttaataatatgcctagccctgatagtgaagaatttgaaaagattattgcacaaattttacttagtgacattcaagataagcaccatgtacttgttttgatgactaatttagaaaaaattaaaactgtttttaccatgattatgaatgagccacagctaaaagattttgaaatcttagcccagggattgtctggttccaataaccgaattgctaagaggtttgtaattgctaaaaagtcaattataattggtgctgatagtttttgggagggaattgattttcatgattgtgggattgatactgtttttgcggcaaaaatcccgtttgaatctcctgatcaacctgaagttcgtttaaggcagaagaaattggaagatcagggaatcgattcttttactaaagatagtttaccaagagctgtcattcgttttagacaaggaatgggccgtttaattagaggagaacaggatcatggtcaatttgtaattttagacccaagattatggactaaagattatggtcaagagttccttcaaacgattcctgtcaaagttgaaaaggttactagagaagaattaaaaaagaaattagaaaataaataattatgttacaagataaaacaaaataaatatgccaatattaccagaatagcgccatttatgaaggcttcataagtgcgcttttttggtttttacgtaaaatctacgtaatacttctttaaaagtttaaattattgatcgaactcttaataccttttttctgtttctcggtaacatgggtatagatcctcattgctgtcctaggtgttttatgtcctaaaacgaattgaatatctttcggggtgattccatttgtgccatcgtaaagcagtgtagcaagtgtatgacgtagaccgtgtggcgtaattttgcgcaatggttttttctcatcttgaggatgcttgtcattccattctttacattggttagcatcgtatctgtatattgctcttatccatgtatcagattgcgatgaccacatataatcaccttttttggtatgaaaaggcattggacagttgtcaccaattttatgacaataattttgatattctttcaaagctgtataaagatgatcagacatagggactgtatgatgtataccgtttttcacatcatcaattgttttcttgtcattttcatctattgcaactgtgcgctcgattttgacagtgcgcttgtcaaaatcaatatctgaccagttaagtgcgaaagcttcaccacgacggcatcctagagatgcaactgtgagaaaatatgtatatgtcattgggctaaatttcttagtcacatctaaaaagcgtttgagttcatctagttcgtaaaagttaagtgtattgtctctactagctattgctgatttttttggcattattacaaagtcaaaaggatctttgtcgcaccagtgacgaaaaatagcgtatttgataattctatgcagctgattagccattattttataagcaacatatttagaagctaagttgttaacatatttctgtacatgatctggcgatatattgctaatgtaggtattgccaaattctggctcaatttggtttttccatgtttccttgattcgcctaattgtagagctgcggacatcatttctcattacttcaagccaagcattataagcgtctctaacggtaatctttttttgcttcgtttccagtttcttccgtatagtacctggtccttgagctttcagttctctacgtacttcttcggcttccttgcgagactttagtttgctacgagttactttgatagccttgccagtttcagggctgatgccaatgtaagttctaagacgaaaaaactttttcccgttttttaatttatactctgtgatctcagggtctttctttctcggcataattatcattcctttctaatttttttgatgatgcgcgctcggcacgaacgcgcatggggcgcccgcgggttagattacttcttgttgatctcgtgaatcaaaagaagtaaaataatcattgcgaatattatttcttccatgatttacacctccgtaggtgtgagcaaaacgcaagcttgcttgcgttacactggaggatagtagtaaatcatgaaggagcgggcgccccaagagctttaatttctagggatgcatccgatgaaaagaagtgtcgatttgatgcttctttttttacactaaaattaaactggtgttctttaaaatcgtataattaaagcccgtttacctgaaagggtaggcaggcttttttgttttatcttagtttctgaaccagttagctgattgtcttaatgcaacccagtgaccacgccagccagcatatacacgccaagggtagtcatgaccggaatacataaccttcaagtctgatcctttctcaatgtaagtcttatgagttaacttactttgatacatataatgtccaaccttgaccttataaattggtgtttccttagtgacctttactcagtgccagcggtgtgagtacttgctgatggcttgcactggctgtgcagtactagccaaagatgcacttgtgccgctcaacaacataatagatgctaatgcagtaactaaaactctatgtttcatgatctgcctcgattgctattaaattaatcttcaatgtctacctctacggttgcatcttcaactggaatatcgattttatgtccggcatcgtcatcaaaggtgtaactcttagcatttaaatcctgtttatccccagtaagaaccattttaaagttggtgtaatagcctttgggcagcttgtcattatgctctgcaaagtcatcactatgttcttcatcgttaggaagcattaagtcctcattgccagtatcatctaaaagcatctggtccttgttggcaccggtaggatatataaataagttttcatctaaccagctcttagggctttctttcttgtagtagttgttactaaacttaccagatagaaccaagtcgacttcatctggctttccagtttcattgtcataattcatgactgaaacacgttgaagcttttttacagtaaacttattgccatacatgtcagtaaatgtcttaccgctccatttttcttcatgctctttaaaatactcatccatccaactactatttttcttggtactgatccaccagtagcgactacctggacgagttccggccaatacccagcctttaaattcaccagccgctcttactctgataacatcgccaggtgtatatttcttagtgccatgaacatatttattgcgtttcttatcaaactttctgaatatagttgttttatctaccataacttttctattcttattccagaaagaagagttaattgaatgaactgcggcggaagcagacgaggcacttgctgcaccaatcccaccagacagcattacagctgataaagcaaccatcaagtatttatgtttcattatctatatcctccaaaaatagatattgccgtaggtttatggtcactggtgttatggactctgttgtaaaagttaaacataaaaatagctcttgataatgcatacatcaagaactactaaaattaactaaggtgtaatagctttaatataactgcagttaatataggtgataaaattcctacaatccacgcaagtttgtcactgtttgatttaagatctcttttcaaactagtaatttcactttgatttttactaaatttattagttagatcgaccttactttcattgaatttatcatcaacgtggtgcattaatttttcagttgaaagatcaatcttggcatctaacttatcaactgcatggtttagttcttcatgtgttacgtatttgtcatttgacattggtggctcacctccaccaatattatccttcttatgtggggtagacaagctatcagtgtttattggtttagcttcatgcaatttcaaaattttatcattcattagagtccgcctcttttattggaattgtggtactaataaaagtaccttcctctaagtcttgatgaaagaatgggtctccaacgtctttagtgctaaaagataatcgcaatttaactttatctttaggataagtaatcttcttatcagggaaagcagaactatctaaatggataggaatgtttattttgaaagtgatttctactaatccacttttagggagcttcgaaagcctaaagtctatctgttcaaaaatcaaaggctgattttctattgaaaaagccgataagtaaaagaaaccctgatcatcatttaatgctgcttgaaatctttgatctaaataaacgacaaatttgcagctgcattcggaaaaactagtcttgattatttgaaaagaatagatttctttctgctctttatttagaagattaaatgataaaagattgatgtgatatttgttgttcattaacttcacatcctttctgccgccttcgggcggcttttattttgcttagaagaaagtaactccaataaatccaccaactataaagacaacgataaaaaataagatgactttaacccattcatcagctgatagatcatctgactgttctgttttgctacttttaatggaactaaatccaccagttgtagttttatgataaatagaatttttaatacttctttccgggtcttttataaagccagtgccttttttgccatagaacggattagttgcgcgctttacagagcggttaattctgccagttgttctagcactaaaagacttttttgcagatggctttcgaaatcctgccatgttgtattcctccaaaatagatattgccataggtttatagtcactggtgttgtggactatatataagttatttgtatgcttgaatgcgttgttgatctttggcaatatcattttcaatatctgaaattgattcatttaaatcttgaattttatgctttataaataacttatcattataaaaattaggatgctttttatagaaaacaatcaattttttgtaaaaagttatcatcttataaaaatattcaatttctttttgataaaaagttgcaagtaatttgccgtgattccaattagtaaaatcttcatctaagcagatagggatgccagtagtctgatgcatttcccataattcactataaaagttgattattctctttgcttcatcagacagtacataacgatcattttcgatgcgtagtagtcctttatcaataaatttttgagtaactttatgactgtttaggttgtagtcataaataaaatatttggggattctagctgtggttagtcgaccttttttaactttgccccaccaaacaagtaaaagcaattcacgcaaaacgaagtcagtattagtattatatttatcagtatatttggggtagtcaaatggtctaccaaattgatcattgtaatcaggacgtgactcacaaatattttgatattcttggagagatctattattttcatgattatagtctgcatcattggcacccgtctctatggtcattgatacaggaatttcaatcccgttttcggtggttacagaccagtttgatgtattaacactttctgattctttttctttactatttgtactcgatacatttttagataaaacagagtgttgatcaatatgtgtagcatcgttttgatttttccgaaaaatggatgtcttactttttttaagctgagactttaaaaagataattttctcatttaattctttgttttcttttttcagagatatgtatttaagagtcacccatattgtaatagctaacaaaattataaaaattatagccatatttatattccttaattaatacagtatttcaataattcttcctgaactaggcaatagttatcagtgcctatgtacttagccagacttaaccaatttgcgtttgacgcatcattgcccagatcaatatacttttttatctgttcgtggactacaaagctatttgcaccactttcacatgataatcgggtagcataatcagtcttgtagtttttttctgtggcgtcatcattttcagcatgaccaagttcatgaagtataactttttccatttgttcgtctgaaagaccttccttaacaactaaaaggttagggtagccgtcaggtgtttctactatgcagccatctccatgagtgggaccaaactgtatttttaagttgtatttctttaatagacgttttaaatgactgtctatagaatcaccttacttgttgctaaaaagagcctttaagtattgctttatcagagcgcggtcatgatcgtctaccggtttaccatcgtaagagtgtgcgttatctatcatttcatctaagtcagcatcagagtatttattagtaggtttgttattgctatatcttggatcaatgtcggcaggagatacatttaaagcctttgataatttaagcaaattagtttcggtaggtaaggatattcctttaaaatatccatttattgtagatttagctaacccacttaaacggacaatatccgcttgacgtaaatttttggatcgagcaatttcgactagattgttggatacaatatttttattttctttatctaatggtgttgattctcctcgtgccataattgaactccttctatatattattaattatatgttcgcacaaggtggaaaaaagttcaatttattttgaaaaaagtgttgacgttcggtttaaaatgaactattatatttatgtaaggttgatcaagaccttaacattaaagaaaggaaagatattatgattgaaagcataataatagcccttggcttagcatacggcttctacaaggtgcgacttgaaagagccaaagcgataaaccaagagctacaaaacgaaaaactcaggcgtgagcttgaggaagatcgttaaccaactgctaggcgggcgagccgcccgcttagcatactttcaattatagttaggtgacaccatgaatgcaattgaggcagtagcgttaatcgtaattgctggattattctttttttggctttactatcatttacgactattgaaagccagaaaagaacataaagagctagtaaagaaggtgcaagatgccaaaaatcaccgcaaaggcagctagggttaatgcagatttaaccctaagagaagcagcagctaaattaggtgtttcttatcagaatctgtcaaatttagaaaacgatgaggataaaatcaccttggggcttgcaaaaaagatgtcaaaaatctatcaaattccgatggattttatttttaagtgaaaggttcggattaaagaaaacaagagcgaatgacaatgaacaaagaaattgaagctttaagtcttgatgaacttgaaaagattcgtgaaaaactctttcaattaggtcttttaacgagggatgcagacttatcaaacaagatttatgaagtgattgatttagtagaaaagaagatggaggcgaagaaacatgcaagaactaatcaaggtaactgttaacaatgatcagcaacttgttagcgcaagagatttgcataaaggacttgctattaaaacgagatttagcctttgggtaagccaaaatttcaaagattttgatgaagaacaagattttacgagcgtagtttcaactacggttgttaataatggcgctagaaagccaattcaggactatgccttaaccattgacatggcgaaacagctctgtctcatgagccgcactgaaaaaggcaagcaataccgcaagtatttaattgaagttgaacgcaagtggaatgatccacaagagattgttaagcgtggttacgccattcttcaaaatgaaaacacacaactgaaattggagaaaaagaacttaacaatccagttggaggaagccaataagaaggctagttacttagatgtgattcttggagcgccagacgcattggcggttacgcaaattgcggcagactacggttataacgctaaggacttcaacgaattgcttcacaaggtaagaattcagcataaagttaacggtcaatggattttatacaaggtttacatgggtcaaggctatgtaacaactaagccgtttacctttatagatcataaaggcagaaccagatcaaagccatcaacgtattggacgcaaaaaggcagaaagctgatttatgacattttaaaagataacgatgttttgccccttgattgaacgcagtgacatcgaataaggaggggctgagatgaacaaagacaagattttcactgaacaacaaattgaagtaattaaagaaattgttagagatgaaatcaaaaaagctgacaagcagcgcttatcagctttgggtcaagaacttaactttaatcctgatgattattaataaactcagtgcttttatcagttagtttaagccaagtgaatccacaatcggtgcaacgaattaaatttacgtacagtgatccgccaataagattgtcttttctcattacaactaaggcaaaagttgttggacctttgccaattgcaatggcttaacatttactgattggcattcaggataatgcagtttattcattaaaatcacctcctttattggagatgactcaattgtaacagaaagcaggtgaggtatatggctcttctgagcattaacgaagaagaattagaaagatttattgctaagcgagttcgtgaaggtgtcagagaagagctagcaaagcgcggagaaattaccgatcaaaaaatgttcagccgcaaagatgcatatcactatcttggtgtaagtggctcgtactttgataacgcggtaaagcggggatttatcaatccgagcctgccaggtgacggcagaacgagatattacttgcgcgaagacctggataggttcgcggaagacgggaaagactatttaaagaaagcaagactttaaggagaaaaagaaatgaacaaagatactgaattttcaaaagaaaagatgtctaagcaagttgcaaaactgtttagcaaggttgatgaagacagcgcaattattatgtgcgtcgcaaatggaagtaatttaggtgaatttgagtatggtaatccgttcgttttagggggggtaatccagcatctaaccgacgaaatgcgtgagcagattgaaaaaatgcctaaggatgaagccgctccattgatgatggacgctctaatgaaaggattaaaggggttacaagatgactaaaaaggaatacgaaagagaatacggcaagacaaagcttgaccacgtgctaagccatatgaccattgcattcggtaaaatcctggaattcatggcaattctatttttaccatttgcgattgtagagcagctatgcatctacggcgtaacgcatcccgaccaaattatttcactgctgctggtcttgatgatcattctcacagcgctgtcggtgcgtgccgttaaaaagttaagaaagaagtgataataatgcaagctaagctttttggcatgcgactaatgcgcgctagaaaaaatcgccagctaacacaattacagctggctgaaagaattggtacaagcatgacaacgattagccggtatgaaaatgggttgtcttttccaagtaaaagacgacttagcgagatcgctcattttctgggcgtgaaagttgactggctattaacaggatttaaggaggactaatgaagctatggtacaggttcatcaattcggtgtggcgtatcaaagagcaggtaagtacagcgagagccagcttatccttgtggctaacagtaacgctattagcggcgttggcggttctagttttgcggttatgccagtagaagtcaagaagattttaggtatcaaaaaagccctcaacggctaatgttgagagcaacgaaataaaaaacaatatctaaaggagattataacacaatgattgagtttgatgatagtgatttacggaacttacaagaagttgacggcgttattttgcaagacgtacacggtgaacgtgtagcaatcggcaaaggcattggctatgagaatgtctttgcttttatgaacgcctatttcgaggaatatggtgcagaagactttgctaaaaaagttggatatgaggacgctgtagacatgtttaaatcgtggcttttaggtgttccagtcgatgaatatgatctcatggactgggtatgtgaatcatttagtggtattgatgccgattcatttcaaaatcagtacgactacgaaaatgaagcttatttagaagcgcaagatcaaaaattagatcaagcattaggaaaagtaggtggcagttatgcatgacgcacaagaatggctagatggcatcattgccgatattcccaacatccgcaaagagatgctagatgactgtcgcactatgaagacctatggcaaggcaaaacagtacgctaagcagttcaaagttgacttcgagggtaattatagggctacggcagaagaacaagcacagagcctatttaacagtcttatcgaggacgtagttacagaactcaatcgagaatctgacagaggagagattaaacatgactgaggcaacaaagctagcagaaatgacaaaagatcagctaattaagatagttgaccagttgcaggatgaaaagaaagaacaagccaaaaaagacaacgctagcgtttatgagcgcttgtcaaaagtagatgtttctaagtttgttgataaaaagaatggtcttaattatctaagctgggcgaaagcctggggtctggtaaagagtattttccccgatgctagttataagctgcgggaatacccatattacacacaaacagcagacggtaattatcagcagattggtacacacgattacttacgtactgagtacggcgttgaagttgaagccagcgtaactattaaaggtgagacatatagttcaaagctttatgtcatggactttcacaatagggcacttgaccctaaaaaagttacttactttgaaattaataaaacgcaaatgcgggcgttaactaaggcgttagcatttgcggggctgggtttgaacatttacgctggtgaagatttaccaagcaacgacgaaaaaacgccacagcgtaaggagaaaattaccaagcaggaattaattcaaatagcaaaaaagcgaaaaactcaatatggtggtggcaaagaactggtaaccgatattgtaggtcttgaaagtagtggagacaagcaagccaaagcgtttattgagaattggaaacagaaagatgaaaagaataaagctctgtacgactttattaagaaaaatgatcttgttacacacggcatgaagataggagcataaatatgagcgaagagcaaaaagcatttactggtgcaaaagcattcttaatgattccaccatcaatcgcggaagataaaaaccttttaaaaaagcctaagtcaattatcttgatgggacatattatttcaatgctgaatatcacaggctcgttctttatgagcaacaagaaaatagctgaaagaattgatgttaattcacgctctgttaataggtatcttgaacttcttgaagagaaaaaattaattagtagagagaatattaaaagcagtgaaaacggtgcaatcataggtcgaaaaatacgtgctggcgacgacctcatgacatatatgtcaagagggtggcgaaatgagtgtcaggggggtactggcacagatgtcgcaacccccatgacaccacggtcaactaaatataacagtaataatagaacaactaatagaacagtagaagatatatatagttctgctgacgcagaaccacctatcccttacaaagaaattattgattatctcaataaaaaaactaatcagcatctacgctatcaaaccaaagcttatcagaaattaattagacaacggtttgaggaaggtgcaacgctagaagacttcaaaaaagccattgataatcaggcatatgcatggcaaggaacgaggttctggaaatatatgcgaccatctacactatttcaagcatctaagtttgattcttatgtgaatgctaatgacttaaatcaagcgaaacagccgtctaatggcggctacggtggcgagccaaatataagtgacattccagacgatgatttaccgttttaaaggtggtgataatgatgcaaggactagaaggaattgcaattaaaaccgaaaaagcagaccaagtatgtccaattcataaaactcaaatggtgctagaccgcaaaggcaagccattttgtattgaatgtatgaaagaacaaactgaaaaagaaaagaatgaccaagttaaacgctttatgcatgacaaggtcactaagattttacgtactagaagcttggtagatagaccagaggacttagaaaagtctttggaaaattacacggctaaaaaaggatcacaagaggcttcaatgggtaatgctgcttataaaattgcccatgaactaattgataaccctgataaagccatgacaacgttgatgtatggcacgccaggcgagggaaagagccatttagcaatgtcaatccttaatatcgtaaatgctaagagcaatccaccacaaacttgcctatttatagacgttagtaagatgtttgacatgatttatgaatctatggaagatccaacgagctggtggactaaaaagaatgctattaactttttgggtagtgtaaatgttctagtgattgatgatctgggcagtgaatcatctatgcgacagaatgaggcaacagaagcaactgaatttaaacaggacgtattaaaacagattcttgataagcaaaagaggctaatcgtcacaactaatttaacgcttaaagagttgcaacaggcgtataaccctaaaatcgttagtcgcttgttatcggattcacgcggtagacgtttagattttacaggaatttcagataaaagattggagctataacacatgattaaaattgttgaaaagtcagaaaaaaacgacttattggaattaaatgttaatgacacaatttgctgttggaatgatgatgcgtccgttgataagaactatttaatggtcacgaaattaaatgactatgaagacttagaaaagccttatacactcattgcacttaatgccactcatgagcatgtagggcaactaatgaaaacgacgtgctagataaatatttttattcaaatcttgacgatttagcccgagatatagcgaacaactgcgatcatataaaaaaggtggatctagcggcaacagcaaaggagcataacgatgacgaagattaaggtagtacagccaccatgtgagtactgtgactttaaaaacatgaatcgagccgcatatgcatttagagaaaagaatggcaggtttggtggcttcttgtcgctaaataatgatggatcctttgacatcaatcgagggatgtataagacagaaaagaaaccgaatttttgcccgaattgcggtagagatttaaggaaagacgctacacaagataaagataagtaattgagaggatagacaaaatgagtaaatttaacgaagccagagccaaaaacattgaagatttaaaaaaggtcgttaaagacatcgaagacggaaaaatcaagttttatcagatggttgcttttcatagcgatgatgaaggctattcaaaaagtttgcaagttatcagtgcaatggatccttatattacgagaggcgtaaatgaaagcttagcagaaaaagccagagaacaaaaccaatccattccggacaatcactcaaacggtatctctttgagtgatttgctggggatgtttggcgaatcaggtaaggaataagcgatgaatgacttattaaaaaatgctaaatggtccgatgcggggctagataaccgaattcacaagctgacgcgtaaggctagacagattgaaaagcatgacacgctaacgccagatgattgggctgaaatcgttgatatggcttttagcctggatgatttagccattgaagtagtggattatgcaattaaacaaagaaaaagaggtattggaggctaaaaatgacagatgaaacagtaaagaaaattcagaaatcagtggagcgtgcagatgatatgacaatcgcattaaactatatcaaatcggcaattgtgcttgactgtgcagaaagtcttaccacggatgatgggcatgttttgaccgatgatgaagtgcaagtaattaacgcacgcttgcttatgaatgcgttgaccatgcttgatgattatgaaatgccgggactaatttggcgcttaaatgatgaaaataaaagccatgataaacacacggagctacttttaaagctgattgaccatgaatttgacaagctaaggcaagagcgtaaggacaatgattttttgaaaaaggtgacacacaatgacaaggattaagtatgttgacaataacaaaaatagaaaacttgatgttggtgactttgtaagcgtcacctctgcggagtatgcgccagctaattttgcaattgttgcatcacgtggagcttattgtacggttgtgaatttaacagatggaatcgattatggacgctgggataccgttgaaaagatgactgaggttttaggcttacagcgcattacacagcagtttacgatttgtccagaaagtaaagatgacgatgactagaaaattaattacgtcagcggaccagttggttaatggcgaagaatatgttttagtcaagagacttcgcaaagtaactgcccgtttcgatgaattgataagtgagaaagcaaagccaggtgaatggacacccctagaagctccacatgctgcatttccgggtgtgttgctgggatctgaaccagcctttaaagaagaccggcagaaactatttgactggctacactggcacaaggtgaagatttatgaacaggttaaagaaactaaggaaaagtaagcaactatcacaaaaagagtttgcagtagcttttaattcttttttagcaaagagagaaataaaaactcaaaatggtaaaaacaaaactattagctacgcgacagtttcaagatgggaaaatcgacagcctattcctgatatctattacaaaagcttagctgacttctttgatgttccggtttcatacttgcaaggaactacatcgtattttagaaaatatcagttatggctttgcagtaaatgtggtaagtctttttggactatagagcagccaaagtattgcccatattgcagaagtacaaagcaattgggatatgcgctttttaaagtgattagtttttagaacggggaagcacaaatgattgatgtaatcaaagtcctgctggttatcttcattgttaccgcaatggtgtggctgacggcgtatacggtgtggttagcctacacggtagtgaaagacaaagtaaaggagttaaagaaatgacagataaagaagaaaaagaaaaactgacagaagcattaaaagagtatttcggtgaggatgttggagacgttgactatacgattactgaatctaacatttgctacggcgaggatctacgagagcctgaaaggcgcatcacgattatcacgaagcctcacaaaccaacctttgaggaaaggcgtaaagagctagttgaccagctggacaaggacttgaaagaaatcgatagatatttaagggttacagcagatggcacccggctatatatttattttgataaaaataataattggatttgtagtttagatgaatgtatgaatccgttgaataatttacaactatatgatgcttgcttatcagttacagaaatgagcaggattacgaacgctctttcagaatacagccgaaaaacatatgtattaaggagacaatacgaagatgaaactatttaatgacttgaaaaagttgcattgcagtccagacaaattagaagcaggtgactatttctattcttggtccactaacactcattaccgtgtgctagaaataaatcactctgagtactttgtaattgagtgtattgaaacaggtagaactacaccaatgacatattcaattgaaaaggcagtaagacaggttaaggcagataacgaagatgttgacttagacaggctaactaagatcgggcctgatgaagcttacatgatttttggcagaaagtagggaatatatgtcgatagatgaaatactgacaataattaatgtgattatgtcatttgcattagtgattttaatttttatctccacacgtcagaatataagattctcacgtgcaatcaataaaaatatggacattttgtttaaaagacaacagctcctgtcgcaagacatggatcagcttcaaaaagcactgattcaagtccaaaaaggtgaagtagctaatgctaaatctatcaatgccataacaaggaaaatgaccgagttgcatgacattgctattgaagatcagacaagacaagaccaggacatcaaagcattagcaacgcttataagtggcttgaaagcgtccagctatcgaagcagaaacaataagcagttcaataatgctttaaagagagtttcaaagctggtgaaagaatgacggttaattgtatcaaatttgtagtacctggtgagccgcaaagcaaggaacgcccacggacagttcgcagggctggcggtgttagaacttatacaccagcaaaaacgcaccgatatgaggatattgtgagatattttgcagtttacgccagaaaagaacacaagataagtgagccaatcaactcacagtgtggtgtgtccataaaagcttattttggtatccctaagagcttttctaaaaagcgtagggaattatgcttaaaaggcaaagaacgccccacaaagaagccagatagcgacaacatcgcaaaaataatctttgatgggatgaacccaaagatgaaattaaacaaagcgttacacaaaaagatggtgctgcaagatggattttatgaagacgacaagttaattgttacgcatagcgtggagaaatggtattcaatgcatccccatgttgaggtaacagttacatgggaagattaatgacggagtgatatacgaatggcagatagagcagagcaaatgacactagatgataatttggaggttgatgcaaaggcaaccgcaaacaacgtgaggaattttcttacgtttaaatttgaacattttcaaaattatgcaggtttaaatgtttctgatctgtctgttgttgatgattcacacctatctagccccaaaatggacgcgtcaggcgtttcatcgcatggtgggataaatcatactgagtcaagttttaaccgcatcatggaagcagaacaagcatgtaaagcaatctataaaactataaaaaattgtagaaatggcggcagaaccccatatcaaaaaatcttatctgaggcttacttgcacaacatggaagattacaagattcagcaggagttaggctatgaagacagtcaatattacatcaaaaagcgccaagctttgtgtgagttcgctgacagatttgaaaaatggaaagactggtatagcatttcttactttgatgaccttcacgtttaccgaaaaaataaaaacggagtttaaacggagtattgtcggagtacaagcggagtgaaatggctatattatagtattgtcgaaaatttaggaagcagggttttcgatgaagtgcaggtacaatgacaatttgtttttctgttacgagtcttaataaaccatatatttattaaaaaactccaattaaccagtaacggcggctggcgccctagaccaggttcgattcctgatgctgttgtagcccgtttattcgggcaaagattaaatctatttctagcaatcttatcttatagttatgcctcgttcgaggcattatgagctagcattcggtgtaatgccacatacgttttatataattgcctggtgtggtgaggttcaactccttactaactcttagccggcttggaaaaccggcgctcattcaatagtaataattaagctacatcacaagtaacggatgatttacttatctagggggttacgccccaaagcagtagtgttgaggcacgttaaacttaattcattaacaatttcaacttggtgcttttgagtttttacttgaaaatgttgcaagcatcaagaaccatatatatggcatatcactgaccaagttggtcacgtgcgtgggttggattccctcactgcttatatgcggaagcgtgtgtataaacccgtgacagggttcacgccattcaatctataaatcgacagcgacgttttgccgggataccgacggaatttcagacaagccaaagggcaatatctttggttgacctacaccggaaaggaaacaggtgtcgttggctgagtgagaaagcattaaattattgataaggtaggcacaatatcagcgagattacaattgccggcggagatttaggcgctctgcataaagcagcctcacgctaatctggcagacatgccagggaaccacgaggtaaatgtaaactaaaattctggtccacgatgatccgcagaaatgtgggtataactgatacgtgtcgtacgagtagcccaaaacgtggaaattacaatataggttttgcatagccatcaatcgcattgttgggtgaaagttggaggacaaatcctcaccaaggataaaattaagtaagagatataaggtcgctccttatattgcgacttgcttaaacttgtgactgaataatcaacgatttaacaagtttaagtggttaatagccacccgtattctaggaatatagccaaaacggtaaggcaacgggctttgatcccgtaatttgttggttcgagtccagctattcctattgaggttgatttcgtgagcaaagtcggtggaggacgtctgcattccgacataaagcagagaaggctaagagccacggaatcgtaaaagaggaaagcctaaggtaagcgtcttgcctcatttgatcaggtagggagttagctcagccggtagagcgttgcaagggtcgtgggttcgaatcccatactccctattgagctgaaaaagctcaaatatatgctctttttgaagttcaaaatttattcatttctaacccttctaactgttatccatatagttagaaaaccacagtcgtactgtggcttttagactcattgctaagcggcaagcggctagtctccaaaaccagtaatctaggttcgaatcctggtgagtctgtcatcatggtggtttatgcaaatggctaacgcaagcagtctgtaaaactgtcgccgaaaggctttgtaagttcaaatctttcaaccaccataaaattaaataaacattgaagacattccacgctatgtgtgatgtctttttttgtttccagggagtaaaaatgtatcacaagaaaccagacaagccagataaatcgctagccaagtgggttgaagaaaagaacagcaaggctacaccaaaaagaagcggtttttggcacgaatcgaaatatcgcccaccagaggacgacatcaaagaagctgaaatcaagcaagatgaaccagaattaatcattcctataccgaaatcagtagtgccaagcattgaggactacgagagcacgtttttgcataaggaggatcaagaaagtatgcaaaataagacattagtcagcaagttaaccgatgaaagacaacatttacaagacaatttattaaagattgatagcaagattatcaatccgctaggcgtgtcagactatcaggttaaattgttgaagatccagcgtactgcgatgatgaccgtggtcaacgtcttagacatgcgtatcagcgatttaagcgcggaaggcgattaaatgaccccagaaaagtattacgagcttagaaagcattataagctggtcaaagaagctgaacatttagttaagtacaataccagcaacaaggcagtagacatgattaaatttgtggcgtttaaacaaaaaacgggcatgatgccacaagagtacatagaaaagtatggagattcatggaaggactaagacacccgctgacacaagaaaataagaccataggtgaggccgtggcacataaacatagaagataccgcggcgttaaaaatccgcttagagggtcattattagagcgcagaatacaacgcgccatttattgtgttgaaaatgacgtagataaagaatttattgattggtttgtcgctgatacagggatgcaaccacaagaattcttagacaaatggagtaaaaaattaggcatatgaaaaatatgacaaaagacaatatggagacaaatcctcgctttaaaaaggctgtttttgtaaatcattacatgagtgaagaggatattaattacttgcttcccaagtaagttaaaaataagttaggagatcaattaatggtggaagaaacgactcgtttagcagaaaaacaggtgcatccctgaattaaagctttttggctctggcgaaactacgatcatataacaaataaaggctattcacctcccgtaattaagtgaggaggtgaatagccttgtcagaaattattcttactttgatcattatacttctgataattgttgcgatcaagtcgtaacgccagagccaagggcgctcgcccttgtgcggtcgagcgccgctaataatataaaagtattgaattgaatataaatatgcgttgctgagagatgacgcttattttttatgcaaaaaatcttttcaattataaaaagttagatggaaacattactcaattcctaatttagctttaataccatctgctaggatggctgaaaaattaagacctgcctctttaccttcttcatttaaatagttagggatggttaaggtctttttgactacacggttatcattttttcgcttatattccgaaatattaacagtaaccaaagtagcaatttcattgtttttggttttaggaattttagcatttgattcaggtaaatcttctaccagtgacatggttccgattaaatctttccccatatcaattgcttctgcaatagttcttccttgggtatcacggtcaaggtctggaacattgaccgtatatttgattttagggtcatcagttggagttataacgattggaaatacaacaattttatcttttttcataattaacaatttaagatggtacacgaataaggggtattgccccttattttaccctttaagattatttcgcttcataatcttttcccaagtgactttgttaagatcaccgtggcgaggaattgattctgaatgatgaccgttggtataaatatcatgattatgaccatgacggtcgaaccaccagccattttcctttaaaactttaagggcatctcttctttttaccatcttatttctcctttcacatattataatacacgtgtttaatacgtatgtcaatataaaatgcagattagtttaatttttttaggaggtgaagctagttttggcagagcagaagttaacaattaaacaaaagaagttcgccgatgaatatgtcaagactggcaacgccacagatgccgctattaaggcaggatacagcgaaaaatatgctcacaccaatgctaataaattactacaaaatactacaatcaaagcccgtattgacgctcaaatgcaaaagctcgaagacgacaagattatgaaggctgatgaagctttgaaactgattaccgcaattgcacgtggtgaagagactacgacggttgagacaaaagacggtttttggttgaccgtacacccaactatcacagagaagcaacgtgctagtgaagccatcttgaagcgctatccattatctgatatggataaagcccagattaagaaggcacaggcagaagccattaaggcgcaggctgaggcacaggtagcaaaggcaaaagccgaacaactccatacggttgctgacaagacccgtgagaagatggacaagctaagcactgaggagttacgcaacttagccaagttagcaggtgaaaaagatgattaagctgacagccgccgaaaagaacggaattgcattagcggcaaaggaatcacttgcgcgtagaagttacagtgattactttctgctggctaatcccagcatgcggatgtatccacatacaaagctgatcaccgagaaactgcaaaagatagcagacggtgaacagcatttttacataatttctatgccgccacagcatggaaagagcttaactataacgaaaacttttccaagttattatttaatgaaatatccagacaagcacgccatgatagtcgcttactcacaagacttatatagtcagtttgcggcaagcaacaggcgtgctttttctgattggtcaggggcgctattcggattaaagacaggcaagaacacagctcagacatttactgtacaagaccacagaggtggtttctatgctacttctgtgcttggtggtgctactggtatgagtgccgatttgctggttattgacgaccccgtaaaaaacgcagaagaagcgcattccatgaccgtcaaggacaagatatgggacgaatggaatttgacgttttacccacgtctgcaaaaaggtggctcggttatcgtgatcatgaccaggtggcaaacagacgatctagccgggcgcttattgtctgaatcatccctaccgtgggaagaagtcaaactgccggctatcgcagaagacattccagccggaacaactgatgcaattggacgcaagaacggtgaagccctgtgtccgcagctgcacacgctcgatgaattgcttacccacaagcatgatatggggacggtcaagtttaccgcactgtatcagcagagcccaattattgagggcggtaacatcttcaaagatgagtgggtcaagtactacgtggacagcagagaaacgcaggcaaggctaggattaaccgataaagatgcggtgattctaccacgtcacttagaccaaaccgtacaagcatgggatgcaacttttaagagtaaggctaatgacgactttgtagccggtcaagtttggtcacgccgtggtgccaattactacctgcgccctaactggtgccacaagcgtttaagctttactgagacgctagacgctattagagccatgtcccgcatgtatcctgacgctactgtaaagctagtggaggacaaggcaaacggtccggcaatcattgacacgcttagacgtgagattccaggaattatgccggtgtcaccaggcgcagacagcaaggaagcacgtgcggcgtcagtgtctccaatgtgggaagctggacaggtttatataccgcatcctgcatggcacccagaagttaaagactggattgctgaaattttaggattcccgaacatgccacacgatgataacgtggactcgatggtatacgcattaagacgacttaacacgaagtttggtggtccaattgttagatactaggaaaggaggatgtcaatggccaaaaagaaaataaggcacttcaaaacgccagttgtgcggtctgattcgcttgacctaagtcctacggttgactatgagtcaattgcatggaagacagttaatcactcacaggactatgaagccttagacgaccgatacaagtatgatgctatcgctcataaaatggtctcaaaggtcgcagaagacgccacaagaaacggattccgtttagtcattccaggcaaaccagacttacaagagatgtatcagaatcgcttaaatgatttgaaaacgcaacaggttttgtctcagcaaatcatctatcaacgcaaacacggagatggctatataacctacctagttaaagagacaaatccaacgagtgcatttgaccctcttgaccctgaaaacatcgagaatgtggtagcattgcacgcattcggtcaaaagaatgtacaaagctatctaaccgacgatgatccaacgagtgacgactacggcaaagagtcaaaattgaagattcaaccaaaacaagccgccaccacattagacaggtacggtaatccaacacaagaaaccaaggacgaaaatgcgattgttcttgatgctaccaggtatagtcacatcagcttagacaagtttgacgatgaccaaacagggacatcaattatcaagcgctgtgaaaagcaactcaataatatggcgattgctaccgaatcagtgggtaaaatgctacgagaatttacgtttaaggtcttccaatctgataggctgatgaatgaaccattagaccagttcagacgcgacagatacgaattagcacgcatagcaaacaccgaagctatgatgtttactggtaacgatgacaccgtgaccaagctagcaacgccaactggtggcatgaatgtcttacttgattacttgtggcaagacctttcaacagcgtcaaacatccctaaatcggttttgacgggtgaacagtctggcacgctggcaggcgcagggcaagacgtgcaaaactattatgacagtgtgaaagccttacaagagcagattttgaagcccgaaatcatgaatattgtccgcttgttgatgtattcgaaagaatttggcggttacttagacccagacagcttagaatggcacattgagtttaatccgctatggacaccggacgacaagacgcaaagtgagacactggtcaaccatgcaaatgcggccggaacactggtcacaaacggtatttttgcccctgatgaagtccgcaacatgttcaacgggcaaggcaacaacgcaattcaagggatgcagaacaacgcaaacgtgactgacagcgccgacaatatcgaagctcgatatacgcaagagcaaattgaccagtactacaaagacttagaaaaggcgcatcccgatggctaggcgacgaaatgggtatccattaaaaattgaacggtcgtactatcgggatatgtctaaactcattcgagagtggcaaaaaatcgccctcagagcggttgacgtgcatttacggcattatcttattaacggcactaaaatgctcacagatgcggataattcacgtcaaccagattggacaaattacgtacagcaaaccttaaatttgatgtcggtcaatatggaaaattccgtcactgaccagattctgcatgatatgacaatgcgttttgtctatgcagtaagccagtttagcgctaataagacgcgtacacatcaagtagcaattcaaacgaaaattggaccttatgcgcttaatccgctaagagataacgcaaaattgcgtgagtacacatggggcaagattctggaaaacacccaattaatcaaaaccatgcaagggcgctatatcgatcagttgaaaggcgacatttaccgaactatcaatgatggcggcggtcttactgatatcacacatgctatcagcaaccgtacagggatgactttgcgacatgctgacttaatagcaaccgaccagacaggcaagatactagctcagattgacgcttaccggaacaaacaggcaggatcaacgcgctatatctggcgttcaatggaggacaaacgggtaagaccaaagcacagagaattagacggcaaagaatttaagtatgatgatcccaacggcggggacaacggtcagctacctggcgagccaatccgatgtcgttgctatcaagaggcagtagattaattaaataaaactggaacgcttcctcaatgcgagggagcgctttttttatgcccaaaattagcaaactttgtgaaattttttggtattccgcccgtgggtgaatctcatttaagcccgttaaatcaacattcttactttgtgaaattttaggaggattttatggcagattcaaacgaaattaaaccagttttaaccaatttaaccaatgaagaaactaagcaagcaattaatgctttgaagcctaaaagcgtggaggtagctccaaaggtagaaaagccaattgaagttgtcaaaccaacaccagtagcaaaggaggtgaagccaatggcagaagtaaaagaccctagagggatgttcgattatacaggctgcgaacagtacaccgtgcaagatggcgaaacattgtttgatgttgctcaaaagtacaaggtcgctttgcaacagttgcgttatttcaaccatgtaccaaaggacaccatgcgagttaagcctaggcaaacactgtacatccccaaagaaccggtattagtgccagtaggcgaatagcatgaacctgacacggtacgatacagcgacgattaacaagttttctgttgattcacaaacaggattcttgcatgtaagcaatgtgccaatcgcacgtgtgggcgtttttccttatatcggtaaaagtgggcagatcaccatggaagccaaacttcctgatgatttattgactgattcggctgttgagagtgcaaattcaaagccagttacagacgatcacccacaagaatcggtgaacgtgaccaatacgaaccgatatatgaagggattaaccgccaataatgcccatgttgatggtgacaagctgaaagttgacatgactatcaccgattcggcattaatcaaagaaattcagggcggcaagcaagagctttcaattggatttcaaactgatgtggtacccgttaaaggtactttcaagggtatggcgtacgattcggcacaaaagaacattcaaattaatcacgtcgcagtagttaaacgtggtcgtgctggtcattcggtgagattaaccggtgacagtgcagaaatggttatagatgattcacaagagaaaggaacatcaatggaaactacaaaaattcgtttagatggtgcagatgtcacagtcgcaaccacagacgcagaaagaattttaaagcttgatgctgacaacaaggctaataactcaaaaattgccaaacttgacgctcaaattaaggctttgacagccgaacgcgacaagttaaagggtggtgctgatgctaacaagaaatcacttgatgaagcacaagccaaggctgattctcttgaaaaggaattagccgcagaaaagaaaaagtttgaaggggatgcactagatcaagcaatcgctgaccgtatggcacttatcgatgaagtaaagccatatgttggcgattcttttgattttaaaggcaaatctccgaaagaaatgaagctagaagctatcagcaagactgattcagtcgatttaagcgctaagtcagatgactatattgacgcttattttgactcaatcaagaaccgcaataactctggcgtagttggttacacgggtattgaaaccaatgtcaagacagacagcgtagacaataaacccgcaaaagaccgctaccacttagcctaaggaggtaattaaatggcaattccagatggagaactttacaacaccggtgaacttgcaccaggtcaattagcaaccattgaacgcgcaacaatcaacaccgaacaagcaggagcaccaatcggcttcggtcaaggtgtcgcaattaaagatggtttggtagttccagcaaccggcggaaatattttcggcgtggctttacgcagaacttacttaaacgctgactacttaacacaagaaaacattgatgctgacaagtggcaaaccggtgaattatttggcgtagttcgtgagggaactattcaagtaccaatcaatgaagatgtaaatgaaaacgagaatgcagccgttgataaggacggcaatttcaagccagcaggcgctaacgacacagtcgttggcgtctttttaggttccggcaataaaggcggtaccgcacgcatgcaaacccgtatccagctttctaacacttctgttacaggctcaggtttgcaaaatgctaacgcgccacaagttgaccaacctagcacaccagcagttaacccaaagccagcatccctatcaacgggttcaacaactggcacagacaacaagaacggaggtaaataatggcgaataaggactatttaacgcgtgaacaacttacctatgttgacaacgttattaagaccccaaaggaacgagaattaacagctatgtctcttttccatacttttagcgttccagcatggactaagcaaaccacatacaaggtaatgactaccgccggacaagccgcacactatgttgacggtgccgacgatattccagtagttgacatgaatgtaaccgaatcagcatccaacttgaccgatattgcgattgcggttagatactcacgtcaacaacttggtgaagctcaacaagtaggcatggacatcttaacgccaatggcaacaagagcccgtagagcgctagcagaagccgaaaacaagcttatttttaatgggcttcataattcaaacccagcacttaacattaatggcttgactgacccagtttctaagttgggcgtgcaagaatcaaccgcaccggttacatttgatgcacttgctgacgacccagacaacaatttaaagattagaaactggctcaaagacgcaaaaagcaagattacacacttggctggctattcaaatgctcaaccaattttagcgttgccacaaagcgcaattgatcagcttgacatgccttataaccaatacaacccacaaatgactgtattgcaaatgattggaccgtggtttaaggacattaaggcagttcctgaacttgaacaccaaaactttggctctaatggcaataaacaagatatgggttatatcttcttgaatgacgcggacattgtacaaattccagtggctcaacaagtacaacaattgcaacaagaataccactcaggacgtaccacaattccttacactgaacgtcttggtggtcttgtaatgtactacccacacgcatttgtacaattgcacggtatcaacgatccaaagaaagcctagttcggaggtagcctatggacgatttacaagacatgcttaatgctgtgaagcaattaagcccagatttaacttctaaactgtccgatgatgcactaaatgggctattgactaatgcttatcaaatagcaatggctgatggttttccaaagcttgccaagaacaacgatggtgagactatcaaagctcgtgacatggctacgcaatacttagccttgcatttaatcacgattaacaaggctatgggcgatggtggcgccaacgttaccagcgaacaagtttcagtattgaagcgaacttatgctgacgttagcaaattaaatctgttccaacgttcgccgtgggggcagctatatttatggctgtataacctttatggcaacggaagcattacaagatatggattggtgcaacactaatggctgacagctttgaagaaatcgaaaataggctagatcatatcacgaaagaaatggactatttaaaccatcatcaggtagtaattggctttttcagtgatgaaaatagcttgcttttgacgatcgtaagagccaacgagtatggggcacacattcgccctaaaaacgccagcggcttcttatggattccgtcaaggcaggctattaaagagttcggaaagaacgttactgcaaaagacgttagaaataagtatcaattgttcatccctaagggcaagcacattgcggctgtcaatcaagacggcaaattggttacatatttctatctgatgcaaaaagtagacattccagctcgtgcctttatcagaaaaaccggcatagattaccgtcaaaaataccgccgatacatcaaggcaggtattgaagagattatgtatgatggcaaaactggtaaagccttgcttgaaaagctgggacgcatgggcgtgagtgatatgagagaggtaatgagacgttggacaaagccaggtaatgcgccgctgaccattgacaacaagcgtggggctaataatcccttggttgacactgggcaacttcaaaaacgcattacttggaaaattttgccgatgacgggaggcacgctatgagtttttatattccgtttgcggatatgctggacagtttcggggttgatttaacggtttccccatatgacagcccagcaaaaaaggctcactttcactacgtgggcggtgtaagagttgaagacgatgacgcgccaaaagtgcaacaggaaaaacgatatgaaccggttgtaccgaataatgcgcaaaattctttcatggctcaattttatacgggtggtgagatggcgcaggcagatcttttatggatcagctctaagctttatcccaagaactcgaccgtagaagtgccgtctcaaccgggtcaaaagtaccgaattactggtaattctaaccttcaaggctattccgacgttgtcatttacgcattaaagggagatgagaagcaccctaatggctagcaatttaccggtattgagtgatcattttttagtgcagtacatacttggcaagctagtcaatcaggtcacgggatgcgaattagtcgaggatgcaaacattgacgaaatggaagactatccgtttttcacgttcaaatggattgactttgaccaagagcctaacgccgactggctaggcaagcatagacagtatatctgcactatgcagattgattgtcactcaaattcgagcgtacaagctatgagccttgctagaaagctgtttgaagcactccacgaagtgccgtatcgcaggttttttaagcaagcgtacatagtacctcaaagcattggtaacacgggcgatagaaccactttacagggcattaattatgatcacgattttggttttgattgctctttcaccgttactggtggctttgagtttttagaaaaagacctcaactttaatgtcgaggattacacaattgaatcaattaaaggcacgtcaagcgttgttggtagtgataccaacagcgcttttaatgtgtccaaaaataaggaggaaatttaatggcagatgctaagacaaccactgtcgttgcaccatatgaccgtgtcagcgacgtaaacgtggttatttctgttttacacccacgtccagtagttgggctgggtaatcttttaatcttaaatgctgtcactgcaaaggctccaacgccagcgcaatcagatggcaaagacggtaagagcaccgatgctaacgcacaaactacgccagcaactaccttgccagatcaattaagcgtacaagaccgcatgaacggaattctattacgcaagactgacaaggcaactggcgcaatttaccgcgaatacaagaacattgacgcggttgcggttgattacggtgaagacaccgcagtttataagaaggcacaaacctactttgcacaatctaaccactccgaccgtgtggcagttttggactatgacccatcaaaggcatacgacgctttgaaggctttctggtactttaactggacctttgcagttcgcacatctaatgacgttgacgacaacttagttgctctgtcaaacattttcgaagccaacaagaaccacattttagtagttcaaagcaacgatgtgactcaatttgacaagatttacggtcaaaattacaccgttggcttgaagcatgacaccgctgaaaacatggacagtgctctcgttggggcagttgctaccttgaccgttggttctgtgacctggaagttcaagcaattaaagggtgtaaccccagaagtcttgacctcaaatgaattgtccgcaatccatagagcacatgcattcgcatatgtggaagttagtggtgttggtgaaacatcagaaggctggactatgtccggtgaatacattgacgtcattcacggcattatctgggtcaacaccaacatggaaaacaagttagagcaattcttgcaagaaaatggcaaggtctcatacgaccaagttggaattactcgaatcaatggtgttgctacgcaagttatggaacaagcctatgcgcaaggaatcatcttaaccgatgaaaccactggtaagggtgattacaccgtaactacttcacaacgtagtgaacaatcacaacaagacttgtctgaccggcattacggtggtttgagtttcacttaccacgtttctggcgcaattcacaccattaccgtacacggtgaagttcaatcagacacgattttaaactagaaaggatttattagatggcagctcataacaacgcacaaacggggttgatgggcacctacgacgccaataatgtttacttcactattgacggtaagactgcttatggctatggtgcaacaacccttttcactttttcatacgataacgatttgttatcagttcaacaagaccctcaaggaacaggtaccgcaagtattaacaacaaaactggcggtacctttactttaaccatcaatcaaatgtcaccatttaacaagatcattgatgatttagccgatgaacgtcgtgtcggtggttatgcggttgatgcttgtgatggttcacgtcactatgtgggggcacacgcatatatccaaaagaagcctgacggtggtgccgcaaacgaagccggtgaaagaaccatcactgttaaggtcttaaacgttgtagaaaattcagttctttaattaaagcgaggtaaaaatttatggacaacactactaacactgaaaaccaaaacttagaaactactgtaaatgttgacgcacaagcaacagaagcaccaaaggcagaagataagccaattagcatggctgatgtcttagctgctagaaacaagcaacttcaaaccggtgcagttcctaaccaacgtggtatcactaaggacatcactcttaacgctggaactccacaagaatacactttgacgcttcaatacccaggttttgccattgcttcaatgattgaagacgattcaacccgtgacggtgacgttaagctatcactcgtattaagcaatgctgttgataatgacgtatttgttcaaccacgtattaagagccttgatttctgggacactcacaagggtggggtagatgttgcccgtgaagtgctttcctttcttaacggcggaatcgacggcaacttggaataaggaacatctaaaagaagcggctgaccgttgggaagacccaattaggttggctatgcacggtattccgcttgatttaaccatgaaagcaaacaggaaccagttaaacatgtactgggaaatcgtgcggagagaagaaaaacaacgttttaacatgcaagcaagcgccaccggattaggtgtctggggtgatggaaagaaatagtgaggtgaagtcaatcagaaaataaactgatggcttttttattttgccaaaaagaaagggcgttaatacatgactgatgcacatgaaggcatgtcgctgtccttaaaagctaattttacgcaagtgaatgaggctaaaaaggctacacaggctttaaactcagcgttcggggaattgcagagacgtgcaaatagcttgcacatgtccgctaattttccaagagaaataaaccatattgacacggtaaccgcgtcatatgttagacgtctggaatctgagggtaaaacatacgaggctaatcaacaaaaggtcaaggcatatcagggcgcgatcggcaaattaagcgccgagcagagccgtttgcaaagtgccttgaaccgcaccactagttctactgacaaggctagtgatgcttatagaagtcagcaaataaaacttaaccaaacagttgctgaaatcaacaagtttaaagctggaattaagtccgctcaatctgagatggaacgaatccatccaaccgggtttaaccgctgggtaaagggtgctaatgaggtcaccaaagccaccagtacgatgaagagtaagctccacagcgcgtgggacagcatccgaggtggtgcaacagttgcggcggctggaattggtgccgttggtgcggctgccttttctggcgctaagcaatcagcggcaattcagcaaaggtaccgcgaaattaacaaccttgctgttcttggtggtgaaaagcaaaaagaagtaactaagtcggttactgaaatgcaacgtcaagggcgtgacatgtccattaaatacggcaagtcacagcaagaaatcgcggcagggtatgaagaccttgttaagcgtggttataccaccaaacaagcaatcggagccctccaaaccgaattgcaagccagtgtggcatctggtgacaaattcagcgatgttactacggtatcttcacaggttcttgacgcattcggtatgcgtgcagactcaaccagcaagatgctgaaaaacaccaaaaacgttgttaacgagttggcttactcggctgatgcaacttcaacaggttttagtgacttaggtgttgctatgtcgtacgttggtactgcggcacactctaacaacattagtttggcggaaacagcgtcagcgctaggtgttctatctaacaacggtttggaatctgacaaggctggtactgccctacgtgccacaatcaatggattaactaaccaagttaacaagatcggttctaagaattctatctttaccaagcttggcattaaaaaatctgaaatggtggacgcacacggcaacctgaaagggctgtcgcaagatatggctgtgctttacaagcacattaaagagcatagtaaaggtggctccgaccaaaacggcttctttaagtcgatattcggaactactggcatgaacggtgccatgattttagctaaatattcgaaagaagtagaaggcttaactaagcggacagaaaaagccggtaagactggtacgtatgtagctgaattagccaaaaagaacatgggtaccgcacaaggtagcgccgccagcgctcaacaggctatgaatgcctttaagatgacgctgggtaacgctgttttgccggcaattaacgaagcaagtaactcgcttgctaagttcttactatcaaaagatggtgaaaaattccagaagggcgttggtaaagtcgtaggtgactttgcaaacggtcttgtaagcctgattcgttttgctacacggcatgaaacgatgatgaagtttgtcggtggtggattcttagcaggatacgcaaccgtcaaagttgcaaaagctgtctcatttgtgggtggattgtacgaacagtacaagaagcttgctgatataagtcctaaggttgcatatattggtaaaaccacggggcagttaactggaacaaataccagctttaaaaacatgaccaagggcgcaaaattagctgttggcgtatctgctgtatttaatgcggctcaaatcggtaacgacttttatcaagctgcaactgctaaaaccgcaacgcaaagaattcaaagtgctggtgctggtatcggtggacttgtcggtgctggaattggtggagttctcggtggcacggtaggtgctacgattggtgcacaacttggtcaagctatgggacctgatgccgctaaaagttttgtaaaagcctttaatggacatgctgcgaagtatttggtttacggcaaaaaaggcagcaaatcaaacggcaagtatgatagtcaagccgaaaaatataatgaatccggttattacaccctgtccgaccataagctgaaaggtaaaaagcttctgtatgcttatgatgacaatggatactatgatttaaagaccaataagtaccatgatcaacgctcccttgctgaacgctcatggggaatgaatcatagattaaatttaaagaccttagcgcattcaaataatgcctgggatcttttgagtggttctgcttctacgatttggaacgctgctggacatattgctgatagagacttttggcgtagaagcggtccagaagtcaaaaaagaaaccaagggaacttggctggattggagtggcttttataagtggattggaaacaatccgcatcttaatccacacggtaagccaagtgatggaatggatagaactagaagtttattccgcgatattggtaaatgggctggaaaacaaaattgggactggggaggctttgatcctcagaaaaatggattcaataaatggctagctggatttaaaccacaagttcatggtaaaaagccccaaaatagtcaattgcagcttaaagcatctggaattcttccaaaagttaatgctaaaaaatgggctgatggagttgttaaagatgctcaaaaaggcatgaaagacttcccatcttggactaaacagcttagtgcaaagtctaataagtggtttaagtccaagtggaacggcatggagcgctggggtggtaaaactaacaaagacgttcaaaaaggctggaaaggctttacttcatggtcaggaaatttaagtcataaatcaagcaaatggttcaagtctaaatggaatggcatgaagtcatgggctggcggagtcaataagaacgtacaaagcggttggcatggtttcacctcatggtcaggaaatctaagtcacagatcaagtaagttcttcaagtctaaatggaatggcatgcaaagctgggctggtggaattaacaaggacgttcaatctggttggaaaggcattaaaacttggtttggcaatcttggtaaaaatgccgttgacctatttaaaaagccttttgaaggtctaagtaaatgggtcagtgatcacacaccaaagcctgtcaaggcggcacttggtgcagttggcaagggagtcaactgggttaaaggtaaactaacaggcaaggcacacgccaacggtgggcttatgcacgcctcacacggtgcccttgtcggtgaagctggtcccgaattagcatacaaaccttatgctaacaacgttcgcttgcttggtgctaatggtccgcaatttacaaaggtttatgctggcgagcatatcctgaatgcacgcgataccgcaaaggtattaaacggcggtttaggtaatgggctaaccctcaaaggctacgcaagcggaactgataagcttggtaaaacctcaaagaaggtaactaacgactacaaacaaattgcggacaagtcatccaagtcacttaatagcctttctaagaagagctcaagcacttggaataagattacacgtcaaacgggtaaagacagctctaagacccgaaaacgggctatctctgactactcagacatgcacaaaggcattgtcaagcagatggacaagacccatgacggtgttatcagtcttagtgaatccactgcaaaaggctttggtaaagcattaggcaaaactaaaggctttgccagggatgcaatgagcgactcaattggtgagattaacaagggtattactggaattgacaaggtccttggacagttcggcggtaatacctcagttatcaagccagttaagtttgctactggtactgacgcaaacgggcgtctaaccgaaaatacccttgctatggtcaacgatgcacaaacaggaccaagacaagaagccttagttagtgacaagaatgaattgttcttaccacgtggcaacaatgtcaccatgatgctaccaaagggctggggtgtcctcaacggggcgcagacccaacaggtggctaaatcagccggtgtaaagcattttgccaagggatcagggctaagccatagcgcattgagaaagcttgctgagaaggcgggagccaacccagcacaaagcttcaaagaaatgttcttagacaagctcaaaccaagcggatcgaatttaaagcgtggttctatcggattagcgcaaaattcatctcagcacttcggtaattcttggtctaacgcgatgtggacggtcatcaacaacgcaatcggcggtggtgatggtaaaggtggcactcgtgaagcattcctgagatttgctgagtctacattctctggcgtcccatatgtcatgggtgctatgagtaaggcggctagtgactgttctggtatggtcgcacaagctttaaagcatttcggaattaatgctgggcgttcaactgttgatatgcaacatagttccgccctccaatatcttggtaaaagcattaatcgaactattccgggtgacttggttattttcggtcatgggacaggcgcagccggtcacgtgggtatcgtcaagaatccaagaaccgggacaatgttcaatgaaacaccgccaaaagcgcgtgtcacacgaattgctgatgacatgggtatgggctatggtttctaccgtgtcaaagggttacacaatgcatcaactgctaagaagactgcaaagccagctactaacttaactgcactagcaaaacgcgaacttggtccagccgctttaaagtggattaaggacaagttaggcgatgaaggttcactcggtggcaacatcggtggtgaaggcgtcaagcgttgggctggtacagttaaacgagttcttggtatgttgcacttgtctacttctgattcaatggtcgcaagagtattgcgtcagatccaaactgagtcaggtggtaatcctaacgcaagacaaccagggagtgacccagacggtaacggttctggtccagcattaggacttatgcaaactaagcgagcaacattcgaagcctttaagcgtaaaggctctggcggtatctttaacggacctgccaacatttacgctggcttgaattatgctaagcaccgctatggttctagcttgtcagcattaggcaatggtcgcggttacgcaaagggtggacgtccaaaagcacacactccatttattgcaggtgaacgtggtccagagctaatcactgctgacggtcctgttaaagttgatagtcacgaacaaacaaagcgtaaagtttctgacttagcgcaaatgtttaagtttccaaagattaacagacctacacggtcacacagctcagcgccggtcattaacatcaacctcaacggtcctatctacgggacaagggaggatgctaagcggattgcggaactggtacgccgtgaaattaataaggttctagtaaacataagcgatgaattaggtacggatccatcgctttattagtaaggagttgtttttatttggctaaaaaagaaaagccaaaaaacaagtctaagccccgtaaggggcgcaaaaagactaaggcgcaaattaaagcagaaagaaaaataaaagaaatcaaagataaggctgataaagctcaccgtgcggcaatgaaagccaatgcgacggcaatgaacttttcagcaaaagtctttaacacgaaagatccaaagctgaaagctaaatatactaagaagtttgaagaatacatgaaaaaatatcatgcagacatgaaccgatacaaaaagtatagaaatcagcttaaaccagctaagaccagcaaaaagcgtgttaataaaagcaagaccacggatcaagccgcgatggtcagcaaaattgaacaacataaaaaagaatttacgaatgaaggcaatatggctatttttcctacactcaacgggacagaaagcgatattgtcttttttagccccacaaatacggaatcagaaagcaattcatcaaacattacttcttatgccgttgatcagggggcacctcgtaaagattacgcaagattcaattctaagacggtcactattgacggtcttatttctgacgacattaacggcggtcgcacagcccatgataaatgggtgcagttaagaacgtggcacagtcaccatgaagaattaacgttccgtggtgacatttattacaagcacttgctgatatcacaacttgaccggcaatttaccggtttcaaaaacacgatgcaggtttcaataacttttacatttgttcgagctgctgagatcacgacaagcggcaaaaagaagaatgctaagcggtcgaagtcttctaagacgttggcaggcaacagaaacaagaactacaccgcaataaccatcaagccgggcgataccctgtggggattgtccaaacgctatggtaagtcggtttcttggcttcaaaaggtcaacaagatcaagaatcctaaccggatttatgccggcaacttgatttatgtcaacgataagaagcataaggctaaaagcaagatgcgagttaagtaaggaggggtgaaatgcgtcaatatattccagtgaacattgatgatttgccggacattttcgacatcgaattggctggcgaggtttacacgctaagaattgactataaccccgttgctgactggtataccatcactatttatcagaatggcgaaaccttgctagaacaggagccgcttatacttaatcagctagtcgctattgatattcctgatactcgtttacctcgaattgatatgagagtgatggacgaaactggtaacgcaaaagatgccggcaaggctgagtttggctatgatgttcaaatttacattgatgtgattgatccacttggttcagaagacgaagacccgactatcaaaccactggggtatgaccctgacgaagatagcgacgatttaacggatcaggaggtctcatattgatagttactagcaacccacacatgtggtttgtctgcactaacgataaaggcaaaacccaaaccgtttacaacaacgagcattataagcataattatccgtttacgtttgaagttaactttgctgattcgtctacgccacagcaaaatacggtcactttgtacaacatgaccaaggagcatgcaaatttttatcataagaaattctattgctatgttgcgtttaactggggaccagataagaagattcttgctgagggatttatcgaaaaaatcggcattcctaaccacgatggtacaactgatacctttacaattactttcactgagggcacgaattacagcaatgtagccgctcgcaaattgaaagtaacaaaagaaaagaaggtcaacaaatatgtaacgaagtgggtcaagcaacctgataagacggttactagataccaccattacacagagaccaaagagtacaaacgaggtcctaaaaaaggacagaagtacacggttcgccatcgaacgccatataaagaaaccattaaaggtaagtggcgtaagaaacggattaaaacccgtgctacaaaagtagtcaaagttaataagacgtttcgcaaaggcacggactataagactttgatcaaaggaattgcaagtcaatcaggaatcgtaatttctaagattgacttagcaaagaatccaactttgaaaaagtcatttaccgcaaagggcaaaccattaacactgcttaaacaggtggtcaaaaaaacaggttcaatcatgacctacattcaaggaaagcttgaaatcattaatccaaaaagcacaaagagaacgtggtatgagattgatggccaagacctgttacagccaccaagttacaacgaaagtagcgatgacagctccggtaaaggaacgtgggaaatcatggttccattggttccagacataaccaccaacgtggggattcacatggaaagtaagtatttgaaaggctatttttatgtgaaagccggtcaacatacatttgacatggataaagcacaaacgcaatgttcacttggaaagatttaaggaggtgagtgttatggcacaatcacaaaatgaagaacgtaaggcggctatcaacgcaatgcgcaaatttcaatggggcattatttctggaatggaaaatgcattaattgcaaaagttattgactataacaagaaagatcatacggcggatattttaccgcttgctaattcaagcgacggcgaaacatcagcacaatatctggatattccggttactgaaaattgttacatgttggatgaaatgattgagcgacttaaaccagaatttaaaagaattgattctgaaacgggttcgcatttggttgataagctgcctaaaaagaagcttatgagaaagggcgtcccagtagttgcggtggtattagaccgtgataatgacaactgggaaggtggtagagctgtcaacacttacactccgaatagttcaagggttcatgatgctaatgatgcgattattgttggagttctcggaggtgatgcgaaaaatggctaaggatttattagttaatgagtacggtgatttagttattgaccctactactcacgacttagcaatcgttgaaggaattgacgaaatagcccaaagaataagggctacactgttaattcgctacggtgaaatgcctaatcttgacccagatcaaggcgcagattacagcaatttcattggtaagaattttaacgctcagcttgcatccgctgacatgtctacgaccatcacagaaaaggttccagaggtcaaaacggttaatagtatcacttttaagaaaatgcctagaagaggcttatatgtggcttttagcgcaactgttcaagttggcgatggtcaaccgaaaaacgtagagggaggttttgaacttggcgatagctagtttcggactacacaagcgggggttcttagctcccacatatgaagaaatactggacagtgtagaagatgacttgatgcaacgttttggcaccgatatcgtcctgacaagtaattccaattttggaattattgcccgactgatagcgtggcgcgaaaccttgctaattcaagaactgcaaaaaacttactattctgcttatatcagcacggctactgaaagctcacttgatcggattggtgctaacctagatcttccaaggaaagttgctacaccaagctttgcaaacattcaaatcgtgactgatgacgaatatttgatacaagcaggtgaacagtttgaaaccgatgacggtgttgtgtttgaccttatcaaggacgtaactaccgcaaaagattcaaatggtcagtacattggagtaggagttgtccaatccgttgaaactggtgactttaacaacgttttgcctaacacaatcactattgtttctaatccggacgaagacattattagtgtgacgaatccgcagaaggcagctggcggacaagatgatgaagacgactccacatatagagcgcggctaatcatggaaaacgtggcaaagcctggaccgtcaacagctggtatcaaatcagcattaatgaatttaccaggagtaagacaagtaaacattattgaaaatccgttcgcagacgcggaccaatacggaaatccaccgtattcggttcacgttttttgtttgggcggaaaagaagacgatatagcgagttgcttagcagataaagtagcggctggtatcagtcttactggtagcaaagaagttcaagcaaaagatgcaacaggtgaggttaaaaagatcaattttgattacgcaaccgacaaaccaatttatgcaagggtcaaaattcggacaactgacgaatggaacgccgacgacggtgctgactatgtaaagcaagaaatagctgattacatcaacagtttactgatggacggtaccgtttacctaaccaaaatttatccgtctatctattcaattgagggcgttggtgaggcactcgttgagatcggaactgaccccgaacatttagcagataaagatatacatacacagccgtttgaagccgtctcttgtgacactagaaatattgaggtggtcgtaaatggcatatgagacttctgaacagcttttagctgagatttcagactactggtataagcgacctggtggcaatctttataagctaattgatgcctttaacgagccactagaagggattagtacaaatgcaaataaggtcgagcgctggcgtgctttaaaagacgcccaaggaacaacgctcgacctttttggtgccgacatccagacatatagaccaagtcaagacgacgacaattatcgcttcattattcacgttatggagcttctttcacgggcacagggtactgtaccctcaatcgtgaaaataacgtctagtgcgcttgaatatgaccacggtttcaaaatctggaagacaggtattcgtcacgtagggatgcagataccgtttgatgcggttcaaaacccgcaaatggaaaagtttatgcttaacaacttgcaaaaaatgctggcgatgggttactggcttgacttgataatctttaaagctactacacacgttcacggctatctaggtgccaccacgcaagatagggaccatgacatcaaaacatttgcgtctatctggtgggaaggctacaaagctaccacgtataaccattggtattttgggacagacattaacgagttgcaaaacactacacatgaagaagtggctacttggtgggaaggttggaaagcacaagcaaagcgcatgtcgtacatcggtaccaagcttttaacacatgaatatcaagccttaaaggcaatctaatgaaagaaggtcaaaatggacaaattcaaagacaccattatcaccgatgcagggcgtaaattactcattaatgtcggcgctggtaatggcgaaattgcatatacacgggcggtgctagctggtcaagatgtcagctctatggctgatgaagacattcgaaagcttgccacccttgaaaatcaaaaaatggaggtcaacgtaattgttacacctccacaagacaacacaatcaccgtttcggcttcatttggcaacaaggacttaacggatgacttaacgtttagctcagtcggttggtacgctaaaaacaacaacgataacaaagaaatcttgcttggtgtatcaccgtcaaacggagaacaaacactagcggcaggttcgccagatcaccggtcaacggcttcaattgacattgatttagcaatggctatcagcaatgccgcaaaagttgacttgacggttaacgagattggcgtagctcacatgagcgatgtcaacgcggctattttgaagctcaaagcggagtatgacccgaaaattgagcaagctggcaaggtcaaaggtgcaaagatcaacgacggggcggttgttgaacccgatgatgacggtattcttgacttgatcgttgatagtgaccgcattaaggattttccggcagatttaaaagacctcaatgacctgccaagcgggacatatcggacttcccaaagtgctgctagctttgtcaattaccctaaaatgcaagatggaactactccttttaatatcccaatagtctggaaaaacgcattaatcaaagtagtcaaggatgctaatgctggataccagcttatagtgtccagccaacaaaaatatgcaatccgctattttagtaataatcattggggatattggtttcagcttccgacattatctaataatgacatcatcaaattaattgactccaaggttgacggactaaacatcggcaattacgccactaagacggacttaactagtgtttctaactcagcagtcaaaaaggttaatggcttaacccctgacggaagcggcaacgtaaacgttacctcaaccgttgcccgcggctttgatgctaacgcaaacgctacaactaagatgacggaagaaaacctgcacggcggcaatcagatcttgatggaccagaatgcaggtcaagacatcgttaactgggcaaaaggtcaatttaacacactgaacgggaatatcaataagctcaacgctaaaactgaaattcccggtgttgccaatgcaaatgatttagttggtgacgcttcttcaatcagtacttacaaattaagtaactctggcaatcttaatgtgccggatttctacccagataagcgtggcacgctaatcaacattaattatgatggaaacgctaaaactcaaatttggattccagtaggtaattcaggtggcgactcaattgctttgaggtactgggaaggcaataactatcctaaatggaaaaaacttgcaaccgttcaggatacaaccaacttgcaaaaccagatcaacgacttgaaaaagtcaaatgctgatttgatcggcactgttaactggttgaaggataatgccgcaattgctagaagattcccagctagtcaagaagcgcaagctcaacaatgggaaaatgatcatccaaactactttgcattgatcgaaaaaatagatagaaagaaggtgaaagcatgctagaccacatgatctttgacagactgaaatggttcaacatcagtgacaatactgatagcgtgaccgcaaacggcaagaattgggaagctattcctaaacaagtagtcttaccacaaggggcaaaaattgcgactttttctggtgatggttctgcttctgcacccgatgccataattatgctaaattctgacactactgcgaatgtcattggtaaaattacggactgttacgcagttactggtgtttttaatggaacgggtcaaagcacagaaaataacgctacattaaacttgagctttgatgaagaatacatttttgacgatcatagatatgaagttaattttgtgtcattcggtcttattcgtgaatcagatgttaaaagtacaaaatggggggggtaaaaaccttctacatactgttgcatcaatggttgaacgtgctttctcttcaattaggaaaggagcgaaaacatgctagatcatatgctgtttaataggttgaagtggttcaacattaaagacgatgctgaaagcatagagatagatggtaaaacttggcaagcatttccaaaaaacgttaaaattaatgacactgctactgccttgccaattggaaatataggtcacggcacctacggcgtcataggagtttcaatttcaaattatggaaaaatttatatcatccgaactgatgcaggtcccattgcaattaaatctgatgccgtaatatctgaaaactggggggggaatacctcacttatacgcttgtatcaacggcttaggtcacttttctacccacgtagggaggtggcttaaatgctagatcacatgatttttaacaaattaaaatggtgggactccacgaaccgcccactgatcggtaaaagaatcactgcgtcgcttgatacttaccacacggttaaagcgggatttaactttactgctgcggattatagcaatgtgccggctaaaaccaaggtagaaaatgccttaattgtagcagcttataaatttaatgggtcagctggtaatgcgccaagcggcacatatattttgactgatcaagataattctaaatggttaaaacttgatggctcggaaaaattaggggggggtaattagccctctaaccaacttgcgtcaagcgtttagggctactgctagaaaggtggtggctctatgattgaaaagatgatcttcaataaaaatgattatcttatgttccctaaaaaggtcaaaattccccaaggagctcaaataagtaccatttttacggattttccaaatactacttactgttcaatgaacgcagatctggaactggacgtatgcgcttcttcgaaaaacggctatctagttggcagaaatagggatttgccaattatcagtgagagagatagtagcaccgtctatggtcctgtatgggttcgaaaatcggactgtacggaaatcttaggggggggtaattagcccgttaatccacctataccaagtacttagagccgccaccagaaaggcggtggctgtatgctagatcacatgaagtttaaccaagaaaattattatccaattagtagcagtgatgtaacagtcaatgctaatggcaagacttatcgtgaatacaaatatcagacaattactaaaactttatcaggtaatgctttacaagttatatctaaccacactaatgatttctatgtagctgatatttctgccttagatatgaatcgaaaaactagatttacttttagtaacggtgatagctttattatgactaattatttgatttataccaacgctggaaataatgattgtggggataatgtgactaaaaataattatcaaatccgattctctccatggaaaaatgcaattgaagcatattactataatggcactcacgatgtaagtcaactggactgggtaaaaatagaaataaacgtagattagcactcaaacgagtgctttttttatgcaaaaaataaccttgctcacggggcgttcccgtgggctttttatatagaaaggagccaataaaatggctgacgaaaatacacaagttgcaccagtagcgggcgccgaaacaaacgctacacaagatcaaaacagtgttgctgaacaagaacaggcattaaaggcaaagttcccaactcttacaggctttgtctacttgtcagatcctgacaatgcggatcccgtttggcatcacaaagtaatcccagtttttggcgatgaagcaaatgtggggctaccatggcaagtccatgctgaaagaccagctgacaacttaaaagacccagtttggacagttggcgctactgattggagtgaaaacgataagaacaaccaacgcattatcttgcaacaagctacacaaaagctggctgaattggacaagaagagcgtagaacttgaccaagctaacgacaaggtagaccaagcattgaaggatatgcaagaagttcaagctcaatcatctaggcaaaacttagctttgatgaagagctttactgaacaaactcaaaacactaatcaaattcttggtgctatgcaaaagaccttagcaatggtaaccaaggcagttggcgcaaatgctaataacgctacaccagctaacccaacaactgatactaagccagcggatcaagcaaccgataagcaatagttaaggaggacataaatcatgactttaatggaacaaattcaagcaaactttttagaaatgtatcgtatggactgggaattcggcatctatgacaagaacggtatgaaggacctagtagtacaaggtttcttatcagctgaaaattaccaaaagattgtaggcgaagcttatgtgccagctactgcaacgcctcaacaataactcactttacgtgatcattagtctgctgattttcggtaaaggcttgggcttttaccttaaccgcagatttttcttttatccaccacaactagcgtggatgatgaacaacgtttacttagactgttcaatgatgattgtgggcgttgtgttgctggtttacacctgttcaaggtacaacaacaataaaattctaggggtgttgttggcacttgtcgtggtgctgctagcaataatttcatcaatcgaaattgaacacgtgatttttgcccataaaatagagtttgtccagaacgctttgtcaaatacggcgattatagcttttatcatctggacagcaaggcattattcgaagcgttaggggtgatatagtgcatgtcgacctaaacagcattatatcggctttatccgctttgcttttaggctactttacttttaagcaaaacggtaaaaaaagtgacatggatagcgtggagaataaccgagattacattgttgaacagaataagcgtttaaacgcggaaaacaaaaaactactcagtgaaaatgaaagattacgaaaggagttacacaattatgaagccaaacactagaattttagattacgttaccttggtgcaagatggcgttttgaccgttgacgatgcaccacaggacatcaaagcggaagtgaccaagtgggttcgctactttgcaggcattaaagacgattcaatggtaaaggatcctgaaagcactacaccagcaccacaaccagaaaagaagcaagatgctactgcttttttagctaagaaggtgactgactaatgaatttaagccaacttaatgaatatctttttgtaggatttcttgtctttgttgctatctgtcaaggcgtttctactggtattgatttctttgcgtctaagtcaaagaagcctttaccaaaggaagttatgaccattgaccagattgccaagttcgtagtaagtgaagccgctacgctcgacatttcaggtgctgaaaagaaagctaaggcggttgaagctttgctgaaccaagcacaaaaggaaaacaagccccttaccgaatccgtagctaagggagctgtccaacacgcatatgaccaaatgcaagctgatcaagaaaaggctacacaagatgaagatgacaatgctcaaccaattggttttgtaagcggtgatgattctgatgacaaagactagatataagacgtacaacgagtacgtttttgaatcttttggaaaatcgtttgaaaaccaaacgattgccaaaagaaaccaaatgaaaggcggtgaaaaagatgtcaaacttaaccgtatcaaaaagaagtttgggtgctgatgtcgcaaactaccaatcagaaaacgtaagctacgccggcattaaatttgcattgattaagcttacacagggcactggctatatcaacccaaaggcaaaagcacaaattaaatctgcaaaggctcatggcttgctggtcatgggctatttctatgccacacactctggttctgtatctaatgcacgcgcagaagctaaatacgccgtagaaaaagcgaaggcttacggtgtcccagctggaagctacatcgctgacgactgggagcagggcagcggcaacgacgtcaacggctctgtcggttcaaacaccgatgctgtcatagcagctatgcaagtgatcaaggaagcagggtataagccacttgtctatgctggcgcttatgttttgcgtaaccggctcaacacagctcgaattgtaaagtcattcggaacttgtttatgggtagcttcatataaagtcatgggtcgtcaagattccgctgactttaattacttcccatccatggacggtgttgcaatctggcaatttaccgataactataaggggtataacgttgacggtaatatctgcttgatcgatttaaaggctaattcaggtagttctaaggctaaatcaatgaacaagaccgtagaatcgccctctcagcaccctgtttgcaagtggaatatcggcgctgttgctgttgtgtcaaatcgcaaaggtgcatacgtctacacgtcatctaagctggataaacgtgaaagcgacaggctcaaaccatgtggctctgtctggcaggtgcttggattggaaaccggcgctgttaaagttggcaaaaaccaatattttgacggtcgtgctgtctacgtcaagactaaccctatcgcatacaacgatcagaaacacggcgttgctaagatcgtgatgcctcacacccatgcgcttgatgctccaaaggctgacgcaggcaaggtctacggcttggagcttaactccaaagtcgagatccagggaagagtcggacggttcttaaagattaaagagctacacaaaggcaagcaggtatatgtgacaggtaatcgcgcttatatcgtgctataatcgtaaatgtaatttatattggacaataaaagagctactttgggattaatttcctgaagtagctctttttttgtgtttctatgataaaatgactttatcgggcagaatggtgcctttatatgtagctttaagcttctatgcatataagtattaatgaagtgaattaaaatgcattttaagagccactctggaggataaaacctctggggtggctctttttttgtgtaatgatataataaaaagagcagtggtattacccacttgctctcttgagttttacttcataaactttttaatgatccatgaagcaattacagtggctaaaacacttgaaaaagtagtagccacaaaagctgttatagacatgaaagtaacactttctaggttgtgataatttggaattggttgggttccacacaaccatttatattttagcaaattttaaaataagaacaaaatattgaaacattgttcacttttaatatataatagtggtggacatgaaaggatacactttcgtttaaagtcccgaagctggttactttgggcatgtgtctagccgtctagtcggtgtttgttgctcttgctgtgccgcaagggcttttttgatacttaaattatcagttttaaatagcaacgaaagagccactctggaggatttgtcctctggggtggctctttttattgcactagtatatccgaaggtatatactatagttgcaacattttcaaggaggtttattaataatggaggttacactacagaaatggggtaattctcaaggaatcaggttatctaaatcattactaagagaaattggaattaccacagaaaaggctacattcgaaattgaggttaagaataaagaactagttttaaaaagaaaaaaagaaagcaagcttgctcaacgctttgaaggctttgattataaagcttactggaaaaaatggaataaggaacatcctggtcaatctaaagaagtagattggggtaaacctgttggaaaagaaatttcttggtaaatatcaatacttagaaagggggtgattttttggcaattgatattcatcaaggggatattattatcattgattttgacccaagtcttggacatgaacaaagaggtaatcgtccagccttagttgtgtcaaatcatgattttactagattaacgcagtcacttgttaaggtagtacctattagtacaactgataatgagttcccattgcatattcctgtacctaatggattgaaagttcatggtgttgctgaagttcagcaagaaacaactttggacctaagtgcaagacattggcgtaaggttgatgaagctcctaaagctttcttaaaagaagctttgaaagcactcgaagaatcttacgaagaggaataaaaaagccgttagtggcaaaaactaacgacaacacaaagcctatatactgatctctgaacaagatttagtatataggcttttaatttttttgtcaaaattaatcaatagttgtgcaataagccacctcgggggattcgtcctctggggtggcttttttgcgttgtttcaaatataatacttgtgagaatagtccctttaatgaaaaatgcccggaaatccccgtattttaatgtggggatggatagggctgtgctataataaatttgaatttggatgatttattaattgggtcaagttaacctaatgaaaaaccgctcacagtttgactgtgggcggtttgacgtaactaaagattttacgtaaaatctacgtaaaaagtaaagcatttagtgttatctataaagataaattaaagctcaaaaggctataaatgactatataacaaatgatgaggtcttaaactatgttacaagatgatacaagacaaacaatcaagtttgtgagttgggtaattggtttgataatagttgcctttctagccagcattgctatcttttattatgctggatctagaagtcggggcaatgatcaaaaagttacgcaattggctactagtaaaacaccaattagaaagattcaaaactattatcatttagatcgcggcactagcagctatgctatagcaggcaccaataataagggaaaacaatattactttatttatttgccaaattctaaaaaggcatatctatatcctgcggccaaaggaatcactgaatctaagattaaaaataagtttaaatctatccatacggatgctacaataaataatattaatcttggttggtataagggtgaggtcgtttgggaagtggcctacaaaaaacaaaacggcaatctaggttatactttatatgaattcaaaaatggaaatgatatctcagaagtcgataatttatagaaactttggtattatggaaactgtataattgatgaaaaggtggataggattttatgacagaattgatttcaattaaagattcttctaaacatgttgatgaagaagtcaagatgcatgtttggttaacagataaacgatcaagcggaaagattatctttttgcaattacgtgatggtactgcatttttccaaggggtagtacgtaagaatgatgtatcagaagaagtatttgatgctgctaagtcacttagacaagaagcaagtttttacattactggtactgttcatgaagacgcacgttcacactttggttatgaaattcaaatcactgatttaaaagtggtttcaaacaatgaaggttacccaattggtaataaggaacatggtgttgacttcttacttgatcaccgccacttatggttaagatcaaagaaaccatttgctattatgcaaattagaaataccatgtttaaggctactgtagatttctttgaaaaagaaggctttatcaaatttgatgcacctatctttatgcattcagctccagaaggtactactcaattattccatgtagaatactttgaccacgatgcatatctttcacaatcaggtcaattgtatggtgaagccggtgctatggcttatggtaagatctttacttttggtccaacttttagagcagaagaatcaaagggtcgtcgtcacatgactgaattctggatgatggaaccagaaatggcttggatgcatcaagatgaatcgttagatattcaagaaagatatcttgcctacatggtgaagcaagttctagaaaataatgaatatgaacttaagattcttggtagagatcctgaaaaacttcgcccaactactgaaggtaacttcgttcgtcttccatacgatgatgcaattaaaatgcttcaagatgctggacgtgatattaagtggggcgatgactttggtgctccagatgaaggctatatttcagaacaatatgatcgtccagtcttcattgtcaactatccaacctcaattaagccattctatatgaagaagaatcctgataatcctaaggaatacttatgtgctgatgtaattgcaccagaaggttatggtgaaatttttggtggctcagaacgtgaaggaaattacgaaatccttaagcaacaaattcttgacgctggtttgaatttagaagactaccaatggtaccttgacttacgtaaatttggtggagttcctcactcaggtttcggtatgggctttgaacgtactattgcttgggtttgtcaccttgaccacattcgtgaagcaattccattcccaagattgattaacagaatgcaaccttaatttggttaataattaaatattgatacacaaagttggactagttattagttcaacttttgtttttgaaaggaaattattttggaatttaatgattatcgggcattaggctttacaaccttacaaaatggattgatcgcttactaccctcaattaggcattagtgatgctgaactaattttgataatccaattggaagcatttagccaacgaggtgagagttttccatctaatgaaaagattgctgctaatactaatttatcggttagtgatgtgggtaatcttattcagcggctaattgaacgaaattatttaactattgaacaaatgactgatagtcaggataaaattggtaataaatatagtctcaataagttgtataatgcacttgatcactatattgatcaaaacgtcttgatcaaagataagaaaaaagataaaactgtttcagttgctaataatttagaaaataatccgttaaattatttgtcacgaaaagtagaagttgaatttggtcgctatctgagtccaattgaacgagaagagattgcgcaatggttaagtgtggatcactatgctcctgaattaattgaacttgctttgcgagaggctgtattgtctcaggcatattctttaaagtatattgatcgtgttttacttaattggcaaaggcatagtctgaaaacaactgatgaagttgagagatttttgaaaaggaatcgataaaaatgacagaagatttattgagtgatgaagaagcacgtagagttttgaaaaaaattttagcattgtatcctgacgcacaaggtgaattgcaatgggatactaactttcatttactttgtgcggttatgttgagcgcacaaacgactgataagatggttaatcgtgttatgcctagttttagtaaaatgttcccaaccccagaagtattagcaaaagctccaattgaagagattgagcatgagataaaaactattggtctatttcgttcaaaagctaaacatttaaaggccactgcgcaaattttggtcgataaatataatggacaggttcctaaggataaaaagttattgatgaccttaccaggggtgggagagaaaactgctaacgttgttttggctgaaggctatggtgtgccagctattgctgttgatactcatgtgtcacggatttctaaaaagttccatattgtagatgacaaagctactccacatgaagtagagaagcgattagaagcaattttacctaaaagtgaatggataaaaacgcaccatgcgatgattctatttggtcgttatacaatgccagctcgagctaaaggcgatccgtattcttatttaaattccgaaaagtaaagccgaaataaattcggctttttttattgaataattttatataatctgttgttactaaattttgattttataatttcaggcctcaactacgtttcggccaaaataaaaacagataacaaaacgctatctgttaataaatatatttaattattgcctagtcattatccgaatcatcattacgttcatgtgattcttcctcaggttttctcgttgatgaactttgttgtgttgaagaagattgtgttcttctttgagaggaagaggctcgctgactgctattggattgagatgatgagccattttcacgacttgatgatgattgagtaactgcagttctagaagatgaaggagtagttccagtattatcgcttgaagtatcagtttcttcatcgtcttcatcataacttgctgcactattaccaattccggctggggtatggcctcgaacaaataattgccaagtgccgccaccagttgctaattctggaggattagagttatttacaattttcgctcttacaactgagctaggctgtttccagtctaggttaggcttattgttcattaggtaggtcatcatactcttatacattagctgtgcagattgttgacctattccagaaatagtaccgtcctttaaattatcgtaaccagtccaaacacccataacatatgatctggtataaccaacgaaccatgaatcttttggagttgaattatagcttgggtacttagctagatcttcatcagagtatttaacagtaccggttttaccagcttgataaagatctgcaatttttgcattagtaccagagcctcgtttgattacgcctttaagcatatcggtaatcatgtaggcagttgatttcttcattacacgtacaccatttgaatcataatttctggttaatccatctggtgtttcaatcttagaaacaaattgcggcttgtggtatacgcccatggtggcaaaagcactataagcaccagtcatttgtaaactagacgcattagcgccaattgctactgataaaccagattttggtgaaacattaacgcccattcggcgagcaaaagctgaagcccgttttactccaacttcagcaagagttttaatagctggaacattacgtgactgctccaatgcatgtcgcatagtcatcatcccgtcgtatttgttgtcccagtcatataattggatattggtaccaggataaacatacttactgtcatcaatcatttttgctgttgaccaattcaagtattgaatagcaggtgcatagtcaagtactggcttaattgacgaaccggtagagcgtccagtttgaacagcccggtctaatcctaattgaacagaaggtaagtgacgtccacctaagattgcaacaacatgaccattgtttggatcaactacagttgcaccaatttgcattttattgtttgtaaaaggtacagaaccgttgttagctaactcgtacagcttgttttgagctttttgatcgatattaatagtaatctttaaattatcgtgatatggatcaaagcctttgctcttaacttcagaaattacctctttaatgtatggatcatcaatttttctaatcttagactcgttattatttcgatgtgatttaagtcccttactaattggttcagcaactgcttgattgtactcagctttagtaattttgtcattttgtagcatagtctttaaaacaatatcacgccggtatttggccttttgcggataaagatatggatcatatgcaacaggtgcattcggcatccctgcaatcaatgcagtttgtgccaaatctaacttacttagtggcttaccatagtagtagttagaagcagtacccatgccataatttccatagttcataaagactttattaatataaaattctaagatttggtctttactgaattcatgttggactttcatagctaaccaagcttcttgagcttttctcttcagagtacgttgagaagcagcagtagagaagaccgttagcttaactaactgctgggttatagtagaaccacctgcagcaatactattacttttggcattagttaacatagaaccaataattctaattgggtcaacgcctaacttatctttgtaaaaacgtttgtcttctactgaaactacagcatcttttaattgctgaggaatgtctttatttttaacataaattcttttttcagaaccaagtgatagtaaaaacttaccattattagtatatagacttgaagatttaccactctgcaattggtcctgactaatgttaggagcatctttggcataaaaagcaaaaagcccgattccagagattactattaaaaatatcagcaaaaagatccatttaatgattctaatccataagtggccactacttggccttcgaccatgatagtctcttcgtgattctcgtttcatattattgttattatctgccatgattatcttttcctatctgcaatgaatttatctaccgccttaagataaggcagtgtaggacgaaagccacttttgatttcaaaagaattgttttcaatttcttttaaagtcattgagcttttatctttttttcgccaagctcgaattacaaaactagctggagtaacaaagtagcgctctaagctagcgaacctaataattgtaaaacaaattccttgttgttttaagcattcgtccaagtgaaaaatttggtgttcatgaaagttttttaatgggaagttagttttattccgtgtttcttttgcctcaaaatcgagatagtatcctttataaacaccattatagtcagttgttgaagcttgcctaaagtaagcttcacgaatgaccgccttagaacgtttgggataatcaactttaacaatttgaattggggttggctttttatgaacaactgcaatttcttccattaaataatatttattagattcattgatttgttgctcaagtgtcatcccacgatcagaaaagttaacaccttttttatgatgatatgatcggtgaactggatgttcatcttttttagttacaggttttctaaatgcggctaaactaccgctaggatatttgaccattgtcctcactcctgttagcattatagcaataaagactacatttttgaacataaaggggggcttaaacaaatgcagcgtttatgggtgactggctatcgcagctatgaattaaatgtttttggcgatcgtgatcccaagataactgtcattaaatatgccctaaaaaattatctgacaagtctactggatgatgggcaattggactggattattactggagctaacctcggtgtcgaacagtggacagctgaggttggacttgaattaggagaaaaatatccggtaagaacatcaataatgattccatatgaagaatttgctaatcgatggaatgatagtaacaaagctaaattcttaaatttgaaggaaaaagtggacttttttgcttcaacttctaataccccttatcaaagtccacttcaattacgtaattatcaaaattttatgattcagcatactgatcgagcattgatgatctatgattcagagcacccaggtaaacctaaatatgattataatttaatccaaaaataccaggaaactaaagaatatccattagatttaattgatttttatgatttacaagatgcagctgaagaataccaagaaaatcatcaaataaatcatttttctgaataatatggtaaaaattttattaaagtctgtttctttattttcagtcagcgttgtttttgctaaaatagggtggaatgtaaaggagttgtcagtaagatggcaaatttaaatgatataaaattatcaggacaagatatattaaagaaacaattcaaaagtaaagtaaagggatatgatcccgatgaagttgatgcatacttagatgaagtaatttctgattatactacttttcaacaaattatcgaagatttgtatggtcagatcggtacgctccaacgtcaattaatggatgaaaagcaaaaagcaaagaaaacagttgaggctgaagaagaaaaggttaagacttatatgccaacgcatagaagaagtgcgcctgtgaagtttgcagaagatgcagatgatactcaaggtgaaatttcgactaatatggctattattcaacggatttcaactttggaaagaaaagtttataatctagaacaacacgtttatggattaaagcattaatttttgctataatgactaacagtgtgaattttgagtaggcgcggctagcttatgttagctgaggaaagtccacgcacacacagactgcgatgtttgtagtgatcgtattcagcctaacaagctggaggaggacgttagtcttcacggcggaaaaagtgctaaatcttcggacatgcattactatcctgaaaagtgccacagtgacgaagcaaggtcagaaatgactttggtggaacgaggtaaaccctgcgagtgtgaaacccaaatttggtgggggagtttcggcctaaggaaatgaactaaaggtcggattattgctttaagcagtaaagatagatgactactgaaggtaatctttgccagagattattggaacaaaacgtggcttatagaaattcacacaggcagagttgggcttttaggtccagctcttttttattttgaaaatgaaagagtaacaatgaaagaataccaactttacgcaactatgggcgctggttttgaaagtgtcgttaataaagaattacagtctatggggtataagacccgtgttgaaaatggtcgtgtcttttttaagggtggtcaagaagatatagttagaactaatctttggctgagaacagctgaccgaattaaaattttgctaaaagagtttagagcaacagattttgataccttatttaatgagatttatgattttgattgggccgaattattgcctgttgacgctaagtttcctgttcaaggtagagctgtaaaatccaaattgcactctgaaccagatgtacagtcaattgtaaaaaaggcaattgttaataagatggttgaccagtaccatcgtcgtggctttttgccagaaactggtaatgaatatcccttagatattcatatttataaaaatgtagctcgaatttcgctagatactacaggcgctagtttgtttaaacgtggctatcgagtagagcatggtggagcccctatgaaagaaaactttgcggccgggctattaaaactaactccatataatggtactcaccccttaattgatcctatgactggttcaggaactttagctattgaggcagcattaattgctaaaaatatagcaccaggaacctggcgtaaattttcctttgatggttttgactggtttaaccctaaactacataatgaagtattggcaaaggctaagagtgaagttaagccgcttgaagcaccgatttgggctagtgatattgatcagtctgttcttgaagtagctaaattaaatgctcacaatgcaggtgtattgcaagatattcgctttaaacaaatcgcagttaaagactttactactgatctagaaaatggaattataattgcgaacccaccttatggtaagcgattgaaggatcgtgagtcggcagaagagctgtatcgccaaatgggagaagtacttagaccgcttagttcgttcagtcagtattacttaactgcagatcctaactttgaaaaatgttttggtgcaaaggctactaagaagcgcaaactatttaacggaaatttgcgggttgatttctatcagtattgggctaacagaaggtaagaaatgattacaaaagagcttaacacagaattttgggtgatctcagatacgcacctaatcgcagatagtttacatgatgaaggacaagccttttcacgcatgcaaaaaactagtcaaggtaaggatttgtattatcaagaaatagccctttctgcttttatgcgaatggcacaaagaaaaaagcctgccgcaattattgtaactggtgatgtgacatttaacggtgaacgagtttctgctgagaaatttgctcaaatttttaagccgttgaaagaaactaaagtgttagttttacctggaaatcacgacatttttgatgggtgggctagagaatttcgtggtaaaaaacagttctatgctggtgaaattagcccaatgttttggcgctcgatctttgataaatcatatcgtgaggccttagatgaagacgataattcattggcttacagtgtccaactgaatccgcaatatcttttagttttagcggattcaaatatttatggaaaagaagagacaacagaagcaccgcacactcacggcgaaattggaaaagtacaattaaaatggattgaaaaacaatttcgttatgcgcaggaacatcagttacgtccggttttatttatgcatcataatttatatgcacataatccagcagttaacaagggctatgtagttgatgacgctgttgagctacgacgtttgtgtgcgcgttacaacgtgaaattagctttttctggtcatattcatgctcaaaatattatgggaccacaagacatgacgcctacaactgagatcgttacatcaagtttttgttctaatgatcaaggctatggagtagtgcgagttcattcacggcacattacatatgtgcggcgtaattttgatatgacaagatatttaacggatgaggaaaaggaaaattatactttagttcattatcataagtatttaaaagatctacagcttggtagtatttctgcggatatgatgcaaagtgaattaaatcagtatcacgaagacatcgagttagttagggcgatggggaatttgtttggctggatgaactatcatttctttaatggtcataatcatataaaggctagcgagttgaataaaatccatgcttctaaagaatatcaagttttgattaagcaccatcctgagtatcggttatatctaaagacgctgtacgacacaagtgatcactctaatttacaagtgaagatacgatactaaacaaattttagtataatggatactgattctaaagaaagcggacatgattatgttaaaagatgaaacaaaatttgatcaattagggcaaaagctttttatgaaaggtgttttgcaagacttcgaaaagaaaaatggtccaattaagggcagaatgatggttacagaaggaaagattccgccggaaatgttaactaagctgcaatctgaattgatgaatagtagtaattggattgtagttgaaggtagttttgatttttataattatactgtcggcatgattgtagatttgactacaggtaagccattagcaaatggatggttggtaccacaattgggtcacccagggatgcaacctgcagagaaatggcaagaatttttgattgaaaaagtcgttgatgcaatcgatgaaaaaggtaagattaatttgccgctatatgtttggatttcagatcgtagtgatttgaccaagacggatcaagatttataaaaatatttttaattatgtaaagcttaaacaaaaaggtaggtcaattttgacctaccttttttaggatttatttattagtattaagaagttattgaattaagtaagtagatattatttaaccagtttaattttcaaagtgagctagttattaattgcctgagcagatttttgagcatcccaccaatcgggtaaatcacacaataacttatttaatgtattattgcggtgcgaaattgagtttctctcattgagattcatttctgcaaaggtttttcctagttctggaactacgaataaagcatcgtaaccatagttactgctaccatgtggatacttagcaattaatccactgattctaccagcactaacaatatcattgctttcttgacctggccaagtaaagacaaaggtagtgtagtagctagctgtccttttttcactagaaactccacctaaatagcctaataatttagctttatcatcttgaccattatggtggtaaggcaagattcctaaagagttaagtagataatcaacacttagacctgagctttctgataatgtaggcaaattggtaaattcagctaaacgatgtgctgtagctctagcattacttaaaaatgttgcctcagaatatgacttttgtggtgcataatctacttcagctaaaccaactactttgataggaagactaagctggttaagtttatcttgtaattcattaattttattttggtcatatgttgtaaataataaactatccattattttccccatgctttcaaaaatagatataccatttatattgtatccgctttcatatactgcacagtcattgtcttatctttgtgaagtaaagtcaagcatagataatagcttttatcaaaaagtccatatacttcaggtttttaaactgaataatgttatttttaatgactaagattgtgaaaattatagaaactgtcaaatcttttgtgtaaatagttctttctcgtaaattgattttttaattatttatttaatcaaagtaggattctaaggtgtcctgaacctgaccaaagcctttatgaattcgattgaaataacggtcattgtagctcattgcctgaatgccaataaaagcatcaagcgactgttcagttggaaactctgccttaggcttagctttgcgcttgatcacattgttaaatgattcaatcatgttagtcgaataaattgaagctctgatctgcttgggatagttataaaagaccagcagatctggttctatgtctttcaagcttctgataacatggctgtaaaccttgccccatttggtatagaagtcatgcaggacagctgtggcttcttctttgtttgtctgttgatgcacctgtttgaattcgttcatgatcttttcacgatcgtcgacgcgtactttagcgcagatattgcgcatgacatgaaccaacagcgttgaaaatgagctttaggataagtcctggccaaggctgttttcatgccaacaacaccatcagaaagaaaaagctcaacttgctttaagcctcgggatttcatgttttgaagcatatctgtccagacttcaatgttctcgctaggcgcaatgcagtagtcaatgacctccttgtgcccattaggcttgatgccaatggcaatatagactgcttcacgctcaaatgtttctcggcgcaaaggaaggtatgtcgcatccaaatagacgcagaaaaacttgtcgcttagcttgcgtttgtggtaagcctcaacctttggaatcatctgcttggaaatatttgatacctgagctggactgtaatggctgccatacatcttttcaattagatcggctatttccctggtggtcacgcccttggagtaaagcttgataatcatgctttccaagatatccgagtgctgcttgtagccaggcagcgtgtgctgatgaaattgaccgttgcgatcccgaggcacttgcacttcaattgggccaaattgcgtatcaactttgcggaaataagcaccatttctagagttgccagtattccagccatttctggcatagggatcatagcccagaaaggcagtcaattcagcttctaacaagttattaacagcctgttgtagctctttgcgcaataaatcatttattttgtctggattgaatagagcttgagcaaaatctttggtaaaatcattcatgaaggagttcttctttctgtatgtgtttttttgttcaaaccaatcatacgagaaaggaactcctttttctaatgtttaaagaaataaatttaaggaatcattcatccttacacaaactattttacagtctcgattaatcaattaataaaaaaataaaattgtattttaataaaaaagagaaaatcttttttagattttctcaattatgattaactagctattaaaaatttccataatgcattattggtgtaccagttttgcggttgaattgctcctagacaggctacaataatataaattgctaatgttgagattatgaatgcaatgcctaagttgacaatgttgaatggaaaggtagttttatgttgtttcattgcgatgtgaatggcgaaagccaacagaaccaaacctataataattccaaattgataataaatgctcattttctctcctaagttacagttaaaagtatacgttaaaatcggattaaagagtgatttttatttatctagcctctttattttatcaaaatcaatgttatattagagaggtagaaagaagattatgtacatatgtctgtagatatttacaatgaaaaacttgaaccatacgacgatggtaagcgtcataaatttagtggtacttttgatagattaaacgatcgcttagctatttttaaggatttgcgtattgcaggtgctggtggcaatccaattgttaagcagttagcactgcattacttgaaaactttcaaagaccttgatttgaagaggggcgatgtagttgaatttgaaggcatggttgaaaaagattctaacaatggcttcacaattgaacgcccaactcaagcagaaaaaatcagatcagcagctgccgatgatgctaaagttgacgtggttggcgatgattggaattggtttgaaaattagttaacggaagtgacttacgagatgtaagccgcttttatttttgaaatttaagtcatagctagaaatgtagtaaaattaagcttgtaaggagaattagatgcactttgatatctttaatcgaaaaactgtctcaactgataaaatgtttttccagacaacattaaatcctaagcaagcaataatcattggcaatggtgctaaatttcgacgttgggttttcttttctactaattttgctacattttatgtaatcattctgtcagctattagtattttattaattaagtctaatgtttctgtactaatttgcttactattagcattagcaaatttagtaattaatcgctcaatacctcgttattggcaaactttctttggcccgaatgctgaatatggaaaaaatcatcgtccagctattttgcctattttatatatcataaccttgttcggttggctttggagcgtatcacatttcgtaggatctttaacttttattactggtacatttgtgctagtaggtcttgcaggtagtttgttatcgctctggatatggatgaatttgaatactgttagttgtgctccaatcagtgaattacaatggcgaaacaatgccaaacgcaggggaatgtctgatgaagacattgataaggttattgctagtttaaaaaagcgtagagcaatatattttagtaaacacgataaataaaattatagacgaaagatagaatttaatgacagattttacagaatttgaaagtacaattttttcatcagacgataattttgccattcgaaaaattaaacataatgtcattttgacgtattgcactcaagatggtgaaaaagaatatgaaagcctaagtaagaatacatatcgtgtattttttgaaaataatcttgaagttagtcgactgtatccacctgatgaattcagtcacaattggctaatccaaattttaatgccgcaactttcaattgattcgctcaaatctatggcgattgccttaactacattagaaagaattgcgcaaagtcaagaaggcatgcaattatctgaatatgttaaaaatagtgagttagtagaaataaagtcctggtttgatctgcgtaataagttgcgaaaaatatccaaagcttatagcctaattaagcaaagtactgatcaaacaacacagtggctaggaagtgatggacatcgttatcgtgaagtgattttagccaatagtttacggcttaattatggtcaagatgaagttgttcgtttaattccaattaaaaataattgggttattcagtttgttaaaactgatttcagtgcaactgatggcgtaattgatcagctttttgcggcattaacattattgactcaatatgtaaaacaaatttaaatcagagatgaaacatattctttatgcccttaatgggacttttttaatgttactcgttccggctttatttgtattagcattacgacaattaagccatgaagctaaccaaaaattggtaaatacatttggttttaatagtcaaattattgttggcggattaggaattattgttcatgaacttagtcatttgattatggctataatttttggtcatcatattaatgcggttagtttattgcgcatccctagtaataccaatgatatgtcacttggctatgttaaacatacttggtctcctacatctacttatcaaaaggtgggtaatgcttttattggcattgcacctgtattaggatgcaccttgctgatttacataatcatgcgtacattgaatacacctatttcattggttcagaatcagcttactactcagttattaagtaatggtaatgcacttaactggaatttcttaactcatagttggatttatatttttgaattatttcagcttaattttgattcaatatggcactcaattgttgctttattgctagtaatcagtctatgttttggtggattcgatttaagcgaggctgatataagtagtggcaaatatgcttttttaggattaattggtataacctttattatgcttctcttagtttcttttctaggctttcacgctgcattattaccgtttttagttaatattactgtctggatttatttggtattcattatatcaatagtgattttagcaataattaatttaattatgtatattttaaatattattttataaaggagaaaataatggcaaaagcgttattagttatcgactatagtaaagactttgtagctgatgatggagctcttacttgtggccagcctgctcaagcaattgatcaacgtattacagaactgtgtaaacagtttctacaaaataaagattgggtgattttcccgatggacgcgcacttaaaaaatgatccatatcaccctgaaactaaattatatccaccgcataatattattggaactgctggccgtgaagtatatggtcaaacgggtaaatggtatttagaaaacaaagataatgatcatgttttattaatggataaaaatcgttattcagcttttcaaaatactaatctagataattatttacgtgaacgccatattcatgacctgacactaactggtgtttgtactgatatttgtgtattgcacacagcgattgcggcatataatttagactatgaaattacaattccacgttctgctgttgctacttttacatcaaatggcgatgaatgggcaatggctcactttaaaaatgcattaggtgcgaatattgctgattaatttaatggcctgcataatttactagtaagtccaattattactatctaataaaaatatacattataattaatgtaaaggaaaaagctatgtaaagtgaagaggtcaaaatgtatacaaatattcgtaaatttaaaaagggcggaaactacccggaacagcaaaatgggctaccacaagcattttttcataatcccaagtataagaagttaagccccgatgcatgatacctatacatgatacttacgatgagaatgattgattcacaaaccaatggatgggtagatgctgacggtaatatgtatattatttattctaatcaagagctaatggatgacatgcattgcaattcttatacggtgaaacgactaaagaaagaattggttaatcatgatttgttactcgaagaagatgctcctgcagaacatgatgataggttatatcctttaagaattaatgaaaacgaaaaatgataaaagacattggtaaatacggcaatgtcattaagttaagacattgacaaattgaatctaatctctgtagaaccgaatcattatgatttggttctttttttgcataaaataaaggcgaaaagaacctaccttttcgccctctgattaaattattaaaccttcaaaattattgccagaaagctggtgttaattatgaaagcccttcacagaaatattttagatcgtcttgatcaaattatcaatgatactggaaagcatattcatgattttatcgatgatcctcatgccttcactaggaagcggtttttagatgcagctacagtcattaaaactactattaatatgcaaggaaaagatttgaccagtgagttgtttagagcttttggccaaaaagctattaaaaataacgataaagtagtcagtacttccgcttatgtccaacgcaaaggtcagctttcacccgcatgttttaagcatattctaactgtatttaatcagaatttatttaatatccagttatttgatcataaatatcgtatatttgccattgatgggtctgattttaatcaaatctggaatcctaaatcagagaatatcgttggaaatctcaatcataaaggaaagccatattgccaaattcatgttaatgcactctatgacctgttaaataatacttatcaagactgcatctttcagcctaagtcaaagatggatgaacgtaaagccgccgttcaaatgcttaaaaagctaaattgcggaccatatatagttactatggatcgaggttataccggctttaacatgattgaaaattgtaatcgcctgcctaactgttattatgtcatacgtactaaaacgggatatggcgcatttaaggaagtagctgagttgcctaatcaagagtgtgataaggatatagcttgctgggtgactacctctaattattattatgaaacccataaggctacagaaaacgttcatttggttaaccatcattaccgtcaatatataaaatatcggtctaaaaataccaaagatggcagctgggactttggagagttatgtacaataaaatttcgtgcctgtaaatttagaattaatgatcctaaatcaggcaaagaagaatgggaagttgttctaactaatctaaatagagccgattatcccttaaaaaggatcaaagaaatctaccatttgcgctggggcattgaaacttcattcaaaaagttgaaatatgctttaggtagcgtacagtttcattccaagcaggatagatttattgaaatggagatctatgcccacatgattatgtttaacgcagtcagtcaaattgatgctcaagcatatgtaccacaaaaaaaatgcaagtatcaatatgcgatcaatttcaaacagtcatgttttgtcatccaggctatgtatataatttcttcttcaactgaaatctttaaaaagattcttattcaaattagtcattacacaattccgatcagaccaggacgaaaagacaaaagaaatctcaaacccaaatcagctgtatattatttatatcgtgtagcctaatttctaaacaagatttgggtttatttggcatgaaaaaagagcattcaaatgcgataaatcgcaaatgaatgatcttaaaagtccaagtcgataatttgtcaatgtcttaacttaatgacattggtaaatacggccaatgtcttttatttagtattagtaaagaaaataactaatgtatccgcatcaggataaggctctgaatgaacacttaagaaattttgcagtttatgattgtattcaatattattttcactttgactattttgataaatttgctctagccagctcggttagccggataaatagcattgttcatggcggaacctacagcgttactttgaacgtcatttagtaaatatgatgtcccaatttgattaatttgattgagtaaatgatctatgcgttctatttcctgcttcttatcatgtacgtttggcacaagcagtagagagacggctgtaatatccatttcacattgtgcccaaaatttatcataaagcttgctaaagttttgatctgattgagctaaaagccattcctggtagatttttaaaatacgaattgttttttgaatatcatataaataaagcttacgataactaaactgctgaaattttcttgtaattccagaaagtagttctgtatagcaatctaagtcttcagcaattttaattgccgagtcatttttatttcctttctgtattttatttacattagctgatacttatataagtctatatgataatactgtactttctatacttttattataagatcatcgcatgatttgttaataataaaatgctcactaaaaatgttgtgacaatttattattaacaactaaaaaattatgatagtgtaagtagtaataattatgaaagagcgtgatgtaaatgtctagatggcatagattatttcctgaacgagtttttgatcgtggagaaatatattatggcaatgatatggttgaaaatattcaattagctcaagatcaggaacactttaccgctcaagttcaaggcggaatgggtcgttcttatactgtaactggtcgtcttcgtttagatggtcgagcttcagagttagactgtaattgtccatgggctaataaagggcatcgctgtaaacacgaggttgcggctttacttgcagtagaaaacgaacaagaaaatgaacataacgttaaagtcccttttgctgacttaatttctgaacatcttaagcaaatgattgcacataaaagcccagtacttaaccccttaaatttgattggcaatatgaaatttaccaaaaaaagttatgatcaggcactggaacttaatgatcactggtcgattagtagttgtcggcattttgatgataagatgcgtaaatatgaatatttttgggagatagtaacagaggacaatgagttaattacattatctgtgcaatttactcgctggcaaattatatcaattaaatttgatagtgatttttcccgtattgaaaaagatagtgttagaatattagctctgttttactttattaatgagtatcttgatgacgatccatttgatttaactaaccaggccgctgaagatctacttgaattttatagtgacgcttctacccaaaatgatgagccgattattttgcgggcaagtattgataagtataataacatccctagtttgacgtttaaattaggaaagaacaagcatctttataaagttaaagatcttaatcaactagtagatgcatcccgacacagctcttctctaaagctaggtaagtttttcaacgagcctataaatcaggctaaaatggatattgatagtcaacactggttatcttttattgaaaaaattatagatgctcgtaatctaaacgaagaattttattataattacagtagtcaggttggtcgcattacactagagaactctgtggccgatgaagttaatgatttactttatcaaggcgtaaagttgtactcaaatgagcagcctataggatatacaactgatcaactagatttaaacattaaaattgaaactcaaaagtcatctgctttagttagtgtagaggatcttccagtttctactataattactgggagtcatgcgtattatggctattacaaagatgtatggatcaaatatataggtcttacgcctgcttctttgcataatttaggattgcagcctggtgctgaaatgcaatttagtaaaaagaccgttgctaagtttgcacataatattttgcctaaatttgagcaaacaaagtttatattagtgtctggtactgatgaattgaaagctattttgccaccagaggcccattttttgtttaaattagattatcgtgtaggcagtattttatgtgtggctcgagtacagtatggggatgcacaatacgagttaaatcaaggatatactgaagaggaccgacgcgatgttgaaaaagagaccgcagcatggaagcacattaatacatattttagtgattatcagcatgggcggtatgttttatccaatgaagactcggatgtcgtacaagcttttctagatgatggtatcaatgagttgaaacgattaggcgaagtacaaattacagctaactttagatcacttttaaagggaataaagattaatttggatgttggagtaggtatcaacctgactaatgaattattagatatcgatcttgctgatcaaaagatgagctgggaagacattcaagcggctttgaaagcctaccaagaaaagcgaaaatattttgttttaaaaaatggaatgctagctaaggcagaacaaccgacaattgaacaattggcacaaactttgcatgatttaggtattagttttaaggatttcattcacggtaaattacatttaccagcatatcgtgccttttattttgctaagcaaatgaaagctgctaatgcactgcatttctcaactaatgaatcctttaatactctgattaatgatttagctaagaatcagttgaagcaaaatcaaataccagttagtttgcaaaatattttgcgtccatatcagaagataggttttaattggctaagcactatcgttaattataaatttggcgggctacttgctgatgagatgggattaggtaaaaccttgcagattattagtcttcttttagctcgcaaagaaaaaatgcaaaatcagttacctagcttaatcgttgcgcctgcttctgttatctataattggcaggcagaagttaaaaagttcgcacctagccttaatgtggctctattagatggcactaaaaaagaacgagagagattgcttttagatgctaaaaagtataatctgctaatcagttcatatcaatcgcttaatcgagatctagaagcgtaccaaaatctaatttttgatgtagaagtaattgatgaagcacaaaatattaagaatcagcaatcagttaccgccaagacagtcaaagtcattaaagcgcatcataaactggctctaacaggaacaccgattgaaaataaattgagcgagttatggagtatttttgattacttaatgccaggttttttaggtttatatcctgactttaggaaaaagtatgaattaccgattgttaaagagcaagataaagaagcagaagatcaattagctaatatgataataccctttatcttgcggcgtctaaaaaaagatgtgctacgtgacttacctgacaaagatgaagaaattgtgcctgttaaaatgaataagaaacaagctgatttgtataatatgcagacgcaaaagattatcgctcaattaaatggacagggggatgaagactttaagagatcacgttttcaaattttggctcagattactaaattacgtgaaatttgttgtgatcctcatttgctttatgaaaactatcacggcaagtctaataaattaattgctacaattgagttgattaagaataatctagcaaatggacataaaattttattgttttcacagttcacagctatgctagatattttgcatgaaaaccttgccagattaagactacctttatttactattactggatcaacacctaaaactaagcgtcaagaacaagttcaaaagtttaatcaaatggctcaaccaggggtctttttgatttcattaaaagcaggcggaacaggcattaacttgactggtgctgatgttgtaattcattatgatccttggtggaacttggctgcagaaaaacaggcgacggatcgagctcatagaattggtcaaaagcattctgttaagatttataagatggttacagaagacagtattgaagagagaatcattgctttacagcaaaagaaagcagaattagctgatataattttgcaaaatgatcagattgctgatgcaacaatgagtaaagacgatttaattaagattttgaaataaatagatcattataataaaataaaaatatttgtttgtacttgcgaactattgtttgcaaaagtataatatttaggtaaacaaaaaccaacaagctaaatgcttgctggttttataattttagtttgagttagtatgtttctttttataccaatacactagaccgaatggaaccagattctcttggtgatgttcgattcgaataatattgcttcggtgactccagtaaattaagattacgagcaatccactgataatgctcaaggcaagatcgtggaaaaagaatgaagcaataaagattagaactactgagatcaaactagttaatgaaaccatacttgtaataaataagatagggaagaagattaacgcacagatcaagaaaaaatggacattatatcctagtaaaaatccagcggaagttgctactgccttgcctcctttgaactttaaaaagacaggaaaagcgtggcctaaaattgcagctaagccaaaaatcaagcaaagataatgtggtcctagtttaaaaattattggtaatactgtagcaaaagttcctttgagaaaatctactataaagacaatgattccagcagctggtcctaatactctaaaggtattagtcgttccgatatttccagatccgtatttcctaatatctttatgaaaaaagatattacccactaacacacctgttgggaatgatccaatcaagtatgctaaaataaacaacgatgcaaattttaatgcaaacatatttaacaacactcctattaatctatcgctattttagcaaagattatcttttaaatatatggtgctggttaaattaatgaacaagtggaggaattttagtggcaaaagctaatacttatgatgattcttcaattcaaattttacatggcctagaagccgttcgtaaaagacctggtatgtatattggttcaactgatattcatggtcttaatcaattagtgtatgaaatcgtcgataactctgtcgatgaagccatggctggttttggtaaagaaattgatgtaaccattcattcagataatagtgttactgtaagagactttgggcgtggtatgccgacaggaatgcacaaatcgggtaagcccacaattgaagttattttaactgtattacatgctggtggtaagtttactgaacaaaattataaaacttcaggcgggttgcatggcgtaggttcatccgttgttaatgcactttcaagttatatgaaggttagagtcgttcgcgatggtaaagcttatgaagaagaatttaaagatggtgggcatccggtaggtacattaaagtgtgtaggaaagacaaaagagccaacagggactaccattacgtttaagccagatgagactatcttttcaaccacgaagtataagtatgagacaattcaggagagaattcgtgaatctgcttttctacttaaaggggttaaatttgtcttaacagatgagcgtgagccagaacatcatgatgtttttcagtatgatgatggaattaaatcatttgttaagtatttaaacgaaggtaaaggcacaattagtgatgtcttttattttgaaggcaagcaagatggcatggaaattgaattttcaggtcaatatagtgatggatattcagaaaatttagtttcatttgttaacaatgttagaactggtgatggtggtacccatgagtcaggtgctcgtagtggatttacacgtgcatttaacgattatgctaaaaagcagggtctactaggtaaaaaagataaaaatattgatggttctgattatcgtgaagggcttagcgcggttttatctgttaaaatccctgaagaattacttgaatttgaaggacagactaagggtaaattaggtactccacaagcacgttctgctgtagattcacttgtttatgagaaaatgtcttactatttaatggaaaatggtgagctggctcaggaactagttaagaaggctcaaagggctagggatgcacgtgaagctgctaaaaaggcacgtgatgaaagcaggaatggtaaaaagagacgaaaaaaagaagttttgtctggtaaattaacgccagctcaatcgcgaaatcctaaaaagaatgaactattcttggtcgaaggtgattcagctggtggatctgctaagcaaggtagagacagaagatttcaagcaattttgcctcttcgtggtaaagtattaaatactcaaaaggcaaaattgcaggatatctttaaaaacgaagaaattaataccatgatttataccattggtgctggtgtaggaaccgagtttaatgttgatgactctaattatgataaagtcattatcatgactgacgccgacgatgatggtgctcacattcagatcttgctattaacattcttttatcgttatatgcggccaatgattgaacacggaaaagtttatattgctctgccaccgctttatcgcttacaaaaaggtcgaggcaaaaagacgcaagttcaatatgcatggactgatgaagaactagctgatgatgaaaagaaaatgggacgtggctattcgctgcagcgattcaaaggtttaggtgaaatgaacgcggaacagctatgggctactactatggatcctaaatcgagaatgttaatcagagttaaaattgacgatgctgctcttgctgagagacgagttactaccttaatgggtgataaagtagccgcaagaagaaagtggattgaagaaaatgttaaattcagaatgggcgaagacggctcaattctagaatccgaagatgaataaaagaaggttttaaatttaatggccacaaaagaacgaattcgagaaatgccacttgaacaagtaatgggtgaacgttttggacgatattcaaaatatattattcaagaacgtgctttgcctgatattcgagatggcttaaagccagttcagcggcgtatcctttatgcaatgtatcaagatagtaatacttatgataaaccatttaaaaaggctgctaaggctgtcggtaatatcatgggtaactttcaccctcacggtgacagctcaatctatggggctttagtgcacttatcacaagactggaagatgcgcgagccgttagttgaaatgcatggtaacaatggttcaatggatggtgatggtccagcagctatgcgttatacggaatcccgcttaagcaaaatctctaatatgcttttgcaagatattgataagcaaaccgtaaacatggtgcttaattttgacgatactgagtatgaacctacagtcttacctgcacgctttcctaacttattagttaatggatcaactgggatctcatctggttacgctacagagattccaccacataacttaggtgaagtgattgatgcaacaatttatttgttgaaacatcctgatgcttctcttgaagatttgatgaaatatgtaaaaggccctgactttccaactggtgctattgttatggggactaagggaattaaggaagcatataagacaggacgtggtagaattcaagtccgtgccaaaaccactattcaagaaattcgtgggcataggcaagaaattgttgctacggaaattccattcgatgttaacaaagcactattagtaaaaaagatagatgaaatccgtctgaataaagaaattgatggaatcgcagaagttcgtgatgaaactgaccgccatggtttgtcaattgtgattgaattgaaaaaagatgctgatgcgcagaatattttaaattatttatttaaaaatactgacttacaagtatcttataacttcaacatggtcgctattgatcacatgactcctgttcaagttgggctaaaacgaattttagcttcttatttagaacatgaagaagacgttgtaactaaacgtacgaaatttgacttagataaggcagaagctagattagagattattcagggcttgattcatgccatggatattttggatcaagtaattaaaaccatccgcgcttctaaaaataaagccgatgctaagaagaatttaatagttaagtataaatttactgaaaaacaagctgaagcaattgtttctttacaactttatcgtttaactaatacggatgttaatgaattaattgctgaacaagacaagttaaataaattggccgaaaaataccgtaaattattatcagatcgtgcaactttagaaaaagaaattattaaagagttaaatgcagtcaagaaagaatttgctaatccacgtcgaactcaaatttcagaagaaagtgctaaagttgaaattgatgaaaaagccttagttgctgatgaacaggttagagtactaattagtcgagatggctatttaaagcgttcatctttacgttcatatcagtcaactaatgatgatgacaatggtttaccagatggtgacaaagtagtttatgaaaacacactatctaccctgactaacttgtatttatttaccaataaggggaatgtcatttatcgtccagtacatgaactaattgaaaccaaatggaaagaaacaggacaacacctatcacaagaaattggattagacagtgatgagcaaattattcgcgtctttgtatttgataaattgaatactgattgcaactttattctggctactaatgacggttatatcaaacaattggagttagctaacttacagccgacgagaacttataagtcacgtgcaatgacagctatcaagttaaagggaaaggatagttatgtggttggggtagatttgatcaaatcagataatcataaggaaatcacattatttactcatcgcgcctatgcaattagatatgatgttagcgagataccaacttcaggagctaaagcagtaggtgttaaatctgctaacttgaaagatgacgattatatcgtaaattatgtcctagttgattctaagtacgttgatttaatgcatgttgggctaattactcaacgtggggcatttaagcaattcaaacttaaactagttaataaagtttctagagccaagcgaggggtactagtactgcgggaattgaagaataaaccgcatagaattgttgctctaatgccatatgctcaagatcatttgttacatgtcactacttctagtgaccgtcatgtaaatattaaaactacggattatccattaggcgatcgttattctaacggctcatttgttattgatactaccgttgatgggacgcccgtaagtattgaattgggaagacccattagtagtcaaaattaagatttgagtttaactaaaacaatatattaatctttaaaaacagtgttaagacatatgttttgacactgttttggatagataatagcagtgttatgggacatggcttatcgtaaaataatattttaggaaagagataatcgttatgtctaaaagtgatactattttatcggctaaatcattgcgttattttttacaattgattgagacgatgaattatacccaagctgcacaaattttaggtattacccaaccggctttaactcagcaagtaaaaaaattggaacgcgctattggtgctccattatttggacaaatggggaagaagttatacctaaccgaagctggtaaagaaatggaagcagcagcgatagagttgctaaataccattaatggtgttattagtgacattcaagaatatacccagtcagataaaggcaatatttcaattggtattctagagtctgtacatgttgatcttttctaccaatttttacgttacttcaataaaaagtatccagaagtaacttttaccgttgattactttgaccgcaaagagctatggcacagacttgattccaatatgattgatatggcgattatgtatatgccagatactactaataaaacaggagctaatttccgtcatcaatacaatcatcgtgatatttgccctgagcatattgttgtactgactcacaaggataatgtggaagcagaagggacatattctgttactcgttttggcaacagaaagtgggttgcatatccggagaattactacttatcaagattaatgcgacttaactttagtaaaaagattgatctcgttactccgtttaaaattgcatctactaaggaaatgatcaaaattgcagaaaatactgatcttgatacttatgtagatcagacttactacgaggcgcataaggatgagattaatttgactcctgtttatattaaaaatatgcctgagtttacgactgcttgtgtttatcgtagaggaaaattagatgttcctaggatgaagaaattactaacggaattacagattttcttagacaataacttggataggaacaataattttagtaaactattaagtgaagaaattaaataaaataattagaaaaagaggcaatttatttaatggaaaaagaatttgtttttggacaccaaaatccagatactgatgcaattggcactgctattgcattttcatatttgcaaaacaagttaggttacaacactgaagccgttgccttgggtgagcctaatgatgaaactgcatatgctcttaaaacattcggctttaaagcacctcgtgtaattaaagaagctgctccagaagttaaatctgttatgttggttgaccacaatgaaccacaacaaagtgtttcagatattgacaaagttaaggttactcatgttgtggatcaccatagaataatgaattttaatactgcagatcctttgtactaccgtgcagaacctaagggttgtacatcaactatcgtatggaagatgtttaacgaaaacaatgttgaaattcctgaaaaacttgctggcttgatgctttcagctatcatttcagacactttgcttcttaaatcaccaactactactgatgaagataaggaagctgtagaagctttatctaagattgctggtgttgactacaaggaatacggtttagcaatgcttaaggctggaactaatatcgatgataagtcagaagaagagttaatcgatttagatgctaagagctttgaattaaacggtcacaatgtacgtgtagcacaaatcaacgttgttgatttatcagatgctttgaagcgtaaagatgctttcttgaaagctatggaagcttcatcaaaggacaacaactatgatatgtttatgcttttggtcactaacattcttgattctgactcagaagctttagttgtaggtagtgacgagactaagactttatttgaaaaagcatttgacaagaaacttgaagattcagaagttaaattaccaggtgttgtatcacgtaagaagcaagttgttccaccacttactgatgctttcaacgcttaatttaaagtggacaaataagagacagttgatataactgcctcttattttttatcattatatgaaaaagctttttaatacactagttgcaattagtactattgtaagcatcaaaaacttaagtatcttttttagctcccacttttcggttatccttgtctcataaaacttaagggggcaaagataatgcttgaaaaaggcgaccttgaactaaatttttatagttccctggattctgaaattatgaataaacttttggaaaaagtactgtcatgatcaatctttatgatctgggccaggtctattttgtctgtgggcggaccgatatgagacgcggaattgatggcttagctgcgatagtcaaagataaattcaacttagatcctttttctggaaaagtctttattttctgtggtggcagccgtgatcgtttcaaagccttgtattgggacggccaaggctattggctgctctacaaaagattcgaaaacggtaaaattgtttggcccaacaatcagaatgaagtcagggttttatcggatgagcaagtagactggctgatgaagggcttctcgatcgaaccgggaataaaaacgacaaacgcacgcaatttctattaattttgcgtgcgtttctggtatgctttagtttatcaaaaaaataagaggggggatcccaatgactaaagttgaaacaaaagatgagaccatccaaggcttaattaataatttaaacgaagagatcgccctcctgcgtgaacaagtagcctacctaacgcaaaaacgctacggcaagtcttaagaacaaatgcctttatccggccaaaccagcttgtttgatgaagacagttttgacagtgacgaagacgaggcccttccctgttgaaactgaaagaatcgtttatcaaagaagaaagcaaaaggctaaggaatttagcatcaactacccaattttggcaatggaacagcttgacagttttactatgagaatatgcagacgcaataaagactattgggctaagaaaaaataccaatcataaattagccacttttcagccagcttcatttggaaaaatgatggaatatatttaccaagacgatggacacctgctcttagaggtagatagttatgataccagtaaagcttgtcatgaatgcggaatggttaatgaaaaattgaaagttggagaaaaagaatggacctgtcctaattgcggacaagtcctagttagagattataacgctagtctaaatatcagagactgggcacaggatataacgaaacatccaaagcatggtaaaactattaacggaagtaaggttaaagattcagacctacttttagtattttaaataaagaaaaaacttgacacagacgagcctttacataaggcattagatattaagaggtactggctgggtttagcagtatgaaacaagactgttataaagccaccaatatctaatgctgtaagaatatggaaataaaggtatttatttctgaaacttgcgaactatgttcgcgaatgtgtcattgatctcatatcaaggcgatgttaacaaataatgtatattcataggaagcgattcgttatttttatcatgtaaaaagatttttaataaaattaacaaatcatatgtttgaaagataagtatatagaaatctcgatagggagtattaataggaagacattaccattattttagattttttaattataatttttctctaataaataatcaatttgtggatcatttccaacttgatatgtatgttgactaaagcacttaaatccattttttgcataaaacttttcccaatccctgatgctggaatttttgtcgaagataaattcgttcaagttcaaaatgatcggaacctaaattttcactttgagcactagcttgattaactttcaaatatccagcaatttctggtccaacttgtaaaaagaaaaatttactatcagcattattaagttcttgcctcaatttttcatcagaataattagtttctaaaaatttatccatatcatttgtagctgtataggcatcgaaagtagctttaaatgtttcgcgagaaatagcttgcaaatcttttaaatcttctggttaacgggtctaatgtggtaattcatattcaaaattcattcacttccataataatgactataatattattaataatttgatgtctagcaaccactgtatatttaaaatttatattttatacttcaattcactaacccatggactcttgaaaggcctaatgtaagcttattaaatagaattggttcagttatattattactttactttttcattgataatatacgcgtggtgctagttaaatcgttttagttaataaaaaagtccaatcttgttagactcaacttgtataataatagaaaagagcctgatctgattgaactgccttaagcttaagcgttttagccaccatttacaagttagttttaaagatttagtgataatttgtcggcactggtatcgtttgtatgcaccggctgagtttactcatcggcgaaatattgatcaaattaaaactacggacagtctgattttggctttacttatctggcaagctaagacaggaattgaatcacaaagaagattctgtgaatgtttcaattgtttatcacactcacgttttaatcggcgttcacgtcagctattgcaattgatttatcagatacggcaagaaatgaataaaaaggttgacctgaatggacagttcttgatcattgacagctttccggtacctgtttgccaaccaattcgcaactatcgtgctaaaatttttcgcggttatgccaacattggttataaggccaccaagaaaatttacttctatggtttcaaagttcatgccattgttagcgatgacggttacattcttgattatgtcgtaacaaaggcatcagttcatgatgccagggagacagttgaactgatagaaaatacccatccatctaattactatcttcttggcgacgaaggctatttaggcaaagaactgcatcaacagctaaaacaaatgggttacgaactttggacaccatatcgtaaaaatatgacaggagctaaaaagcacaatgatcatcaattgatggctattcgcagaacaattgaaagcgacttttcgcttctgacctattacaatgccgagaacaatcgagcacgtagtctgataggctttcaaagccggttggaaattgcaattttagcttataatttggcttattgtctagaaagatttaactagcaccacgcgttgataatatgtatattattttcagtatagccaacacatatttggaaactgtcaaatcttttgtgtaaatagttctttctcgtaaattgattttttaattatttatttaatcaaagtaggattctaaggtgtcctgaacctgaccaaagcctttatgaattcgattgaaataacggtcattgtagctcattgcctgaataccaataaaagcatcaagcgactgttcagttggaaactctgccttaggcttagctttgcgcttgatcacattgttaaatgattcaatcatgttagtcgaataaattgaagctctgatctgcttgggatagttataaaagaccagcagatctggttctatgtctttcaagcttctgataacatggctgtaaaccttgccccatttggtatagaagtcatgcaggacagctgtggcttcttctttgtttgtctgttgatgcacctgtttgaattcgttcatgatcttttcacgatcgtcgacgcgtactttagcgcagatattgcgcatgacatgaaccaaacagcgttgaaaatgagctttaggataagtcctggccaaggctgttttcatgccaacaacaccatcagaaagaaagagttcaacttgcttcaagcctctggacttcatgttttgaagcatctctgtccagacttcaatgttctcactaggagcaatgcagtagtcaatgacttccttatgtccattaggtttaatgccaatggcaatatagactgcttcacgctcaacgctcaaacgtttctcggcgcaaaggaaggtatgtcgcatccaaatagacgcagaaaaacttgtcgcttagcttgcgtttgtggtaagcctcaaccttggggagcatctgcttggaaatatttgatacttgagctggactataatgactgccatacattttctcaatcaagtcagcgatttctctggtagttacgcctttggagtagagcttgataatcgtgctttccaaaacatcagagtgctgcttgtagtcaggcagcgtgtgctgatgaaattgaccgttgcgatcccgaggcacttgcacttcaattgggccaaattgcgtatcaactttgcggaaataagcaccatttctagagttgccagtattccagccatttctggcatagggatcatagcccagaaaggcagtcaattcagcttctagcaagttattaacagcctgttgtagttctttgcgcaataaatcatttattttgtctggattgaatagagcttgagcaaaatctttggtaaaatcattcatgaaggagttcttctttctgtatgtgttttttttgttcaaaccaatcatacgagaaaggaactcctttttctaatgtttaaagaaataaatttaaggaatcattcatccttacacaaactattttacagtctcaaagattagggtgaaaatgaataaactattttaatagtgttaacttgtattatattaaatatcaatattggcttatttatttagtgaataaagctcgtaacctcaaccttttaggctattctaccgcaaataacaccttgtattaaatatttagccttgtaaatttttaagagaaatttacaaaataataagaataaaatcgatcaatcaaatgtaactacaataattaataaagcctataataaactatgactatattttggaggattaaagatactaatgagtttacgaaaaaatctacgagatatttttaacagtgctaagccttcagaatcaaggcaattagcttgtgctttaacattctgcggtggctttattgatgcttatacatatatccaaaggggacacacattatctgctggacaaacaggaaacgtaatatttttcagttcagcattggctgaccataatattccaggaatgatcaatcgtgcaagtacatttatagctttttcactaggattacttcttgtaggactttttcataaatacgttaagagtcaatattggagagtattttgtttgttcccaatattagtaatttgtaccgtcgttggatttttacctaaaagcgtaccaaattactatatagttccagcaattgcttttggcttagctgttcaaaatgcatctttcagcaaaattgaaggcatgggatacaataatgtatttacaacaggtaatttgaagaaatctgtagttgcgtggagtgcatttttctttggcgcagataagagtcagcacacagcagccgttaattatatgatgataacaatttcatttgcagttggagcaaacgtttcagcgttactgcaaaagatttgggtattaaaaactatttggtttgcagttgtatttttagcagcgattaattttgtatatctgttagctttgaagacaaacaataaattgaattttaaaaatgaataagttttatggatcatctgtaatttttgcagatgattttttatatcaaatttacgagaaggatggcagagagtacagtaaaatgcttcaagacatatctgcgtataattcatattatgtaaagccagattgaaaaacaatcaatttaataatagaagtcataattaatttaattgtttcagcaaataagtcttattttggatttgttaactcgaattcagagactgtaaaatattttgtgtaaggatgaatgattccttaaatttatttctttaaacattagaaaaaggagttcctttctcgtatgattggtttgaacaaaaaaacacatacagaaagaagaactccttcatgaatgattttaccaaagattttgctcaagctctattcaatccagacaaaataaatgatttattgcgcaaagagctacaacaggctgttaataacttgttagaagctgaattgactgcctttctgggctatgatccctatgccagaaatggctggaatactggcaactctagaaatggtgcttatttccgcaaagttgatacgcaatttggcccaattgaagtgcaagtgcctcgggatcgcaacggtcaatttcatcagcacacgctgcctgactacaagcagcactcggatatcttggaaagcatgattatcaagctttactccaagggcgtgaccaccagggaaatagccgatctaattgaaaagatgtatggcagccattacagtccagctcaggtatcaaatatttccaagcagatgattccaaaggttgaggcttaccacaaacgcaagctaagcgacaagtttttctgcgtctatttggatgcgacataccttcctttgcgccgagaaacatttgagcgtgaagcagtctatattgccattggcatcaagcctaatgggcacaaggaggtcattgactactgcattgcacctagcgagaacattgaagtctggacagagatgcttcaaaacatgaaatcccgaggcttaaagcaagttgagctttttctttctgatggtgttgttggcatgaaaacagccttggccaggacttatcctaaagctcattttcaacgctgtttggttcatgtcatgcgcaatatctgcgctaaagtacgcgtcgacgatcgtgaaaagatcatgaacgaattcaaacaggtgcatcaacagacaaacaaagaagaagccacagctgtcctgcatgacttctataccaaatggggcaaggtttacagccatgttatcagaagcttgaaagacatagaaccagatctgctggtcttttataactatcccaagcagatcagagcttcaatttattcgactaacatgattgaatcatttaacaatgtgatcaagcgcaaagctaagcctaaggcagagtttccaactgaacagtcgcttgatgcttttattggcattcaggcaatgagctacaatgaccgttatttcaatcgaattcataaaggctttggtcaggttcaggacaccttagaatcctactttgattaaataaataattaaaaaatcaatttacgagaaagaactatttacacaaaagatttgacagtttcctgaattgaataatatgctgacaataatcaataaaacaaccttcaaagagaagtattttgaaacaattatggtaaagtaattctaattaaaaacaatgaaaatagttgagtaatatttgctagttttgcctttagtatctataaagccattttttatttttatgctatagctttctttaaaacaaaaattttaatgatcgctagataaacctatctcgcaaaagcctaattttggtaaatttgtgcttttgttatttttattgttttaacgttttgtatttcattttaaattcgtaaaaaaatattttataaattctttgctctttttgctacatacaaatcggtattaagtgcttttatatttattcttattccctatttttaagatttgctgcaataatacacatattgaaatttcttaaataaataatcaagcggtaaaaatgataattctactaaactcatgactcaagtcgctacttaaatctgtgtttttacatgaataagacatctaaataaagtttcaatcttcaaaaaatgctgagaatcactctaagatttctttttaatgaattaatttatcgtggttactcaatctttatacaaacaagcaacattttaattcattattatacctctatctcccctcctctgctgaccagggaagacgaaaaaagagccgaaatcagacataattcgtccaatcaggctctttgcttatctagctagaataaaaatctgaataaactcaatctgttgcaggtctaattttattcataatgaaggcaacgacgattaccaagataactgcacctaaaattgacggtacaattgccatgtccgcaaccttcggtccccattcccctaaaagggcttggcctagtgaagatccaaccaatcctgctaaaatattagcaatccagttcattgacttaccatgtccagttaaagcacctgcaattaagccgattactccaccaacaattaatacccaaatccaatgtagcattttgatcacatttgctttcttgcaaaatatcttatcacatttctgattaaacaaagcgctttctttaactatctttattttgagactgtaaaatagtttgtgtaaggatgaatgattccttaaatttatttctttaaacattagaaaaaggagttcctttctcgtatgattggtttgaacaaaaaaacacatacagaaagaagaactccttcatgaatgattttaccaaagattttgctcaagctctattcaatccagacaaaataaatgatttattgcgcaaagagctacaacaggctgttaataacttgttagaagctgaattgactgcctttctgggctatgatccctatgccagaaatggctgaaatactggcaactctagaaatggtgcttatttccgcaaagttgatacgcaatttggcccaattgaagtgcaagtgcctcgggatcgcaacggtcaatttcatcagcacacgctgcctggctacaagcagcactcggatatcttggaaagcatgattatcaagctttactccaagggcgtgaccaccagggaaatagccgatctaattgaaaagatgtatggcagccattacagtccagctcaggtatcaaatatttccaagcagatgattccaaaggttgaggcttaccacaaacgcaagctaagcgacaagtttttctgcgtctatttggatgcgacataccttcctttgcgccgagaaacatttgagcgtgaagcagtctatattgccattggcatcaagcctaatgggcacaaggaggtcattgactactgcattgcgcctagcgagaacattgaagtctggacagatatgcttcaaaacatgaaatcccgaggcttaaagcaagttgagctttttctttctgatggtgttgttggcatgaaaacagccttggccaggacttatcctaaagctcattttcaacgctgtttggttcatgtcatgcgcaatatctgcgctaaagtacgcgtcgacgatcgtgaaaagatcatgaacgaattcaaacaggtgcatcaacagacaaacaaagaagaagccacagctgtcctgcatgacttctataccaaatggggcaaggtttatagccatgtcatcaaaggtttgaaggaaattgagcccgatctgctagtcttctacaattatcccaaacaaatcagagcttcaatttattcaaccaatatgattgaatcctttaacaacgtcatcaagcgtaaagctaagcctaaggcagaatttccaactgaacagtcgcttgatgcatttattggcatccaggcaatgagctacaatgaccgttatttcaatcgaattcataaaggctttggtcaggttcaggacaccttagaatcctactttgattaaataaataattaaaaaatcaatttacgagaaagaactatttacacaaaagatttgacagtttctttattttaagcgaatgaactatttcttgtcacttttaaaatatattatttgactgtcttatacttttctttagatttggggcatatttcttgccacgactaattctttattttttgtctattgtatatctcaatttgatttcaatttttttcggtttgattactgatatattaataaatgatctcatctattgccttttgagaactatatctgtagtctataaagtataaattatgtgagagatatagataagattctctccactaagtatggaggacataaattgtttaaaaggaaatcaattattaaattagcatgtgcaactatgttaacgaatgcaggtgtcacatttttatctcaaatgactcgtttctctgactcagagagcattgtgcaagcttcatcaacatcagttgttgctaaagcccttggaattgatgttgccagctaccaaagcgcagatttaactgctcatgccaaggctggttctcaatttgcaatcgttaaagttagtgagggaaccagttatcgcaaccctaaggcagccaatcagattaaatctgctattgctaatgatatgatgccgatggcttatcattttgcaacttttagttcaagttcatcggccgctaagcgcgaagcgcaatacgcaatttcttctgctaaggcgttgggattaccagctggctcatacttagcctgcgattatgaaactggtcagggcaatatcattactaatggtaaaaatgtgacagctaaggctattattgcctttatggatcaaattaaggcggctggctatcaaccacttctctatgctagttcttccgttttgcaaaacaatattaatactccatctatcgtgaacaagtatcctaattcactctgggtagccgcatatgcgatttcaggccgagtagaccaacccaactttaaatacttcccttcaatggatggtgtcgcaatctggcagttcacagataattggcgcggaatgaatactgatggcaatattacagtcttgccattatcaatcgcaggtaacgcggcagtttcacaggctcctaaggcttccaataccaagaaaacagctacagttatgtacaagtcatatgtttatgacaaaaatagcaaccggacaaatgatttttataatgcttacagctctattgcttattatgacaataaggtgagaattaaaggcaaatcaatgattcgtgtcggtgaagacaagtatgtgatggcaagtaacgtactaggcaattcacgcgtctttaaagctgatgctaaagtgtataaaaatgatggcaccattaatacaaaatggtctactaaaaaatccggttcaccgatcaagacttatggccctaaacattacatcaataatgaagcttactatcgaattggtaaaaatgcttacgtcaaagcagacaagttctaatttatttttagcagcaaatatttgctgcttttttgatgcatccctaaaacgtaaatgaactgacaaatcatttccaatttatttatctgcatcccttttttatccatgttaaaattaaggcattatatagaaacgaggataagataaggatgaaatttaaaaagaagttagctttattcttaggtctgggagtattattgctttctctgactggttgtagtgattttcaaaactgggaattatctatgcgctctaagattggggcattgcccttaacagtatcaacgtatgattctaatggacaaaagatcgaccagatcaaagctaagtcagttaatattcatactgataaaaagatgtcacagaaaagtagtaatggcactgaacattctagcgtaattgatgttgactatggcaataatcgaatgattcacgttggttctactatgattgcctatgaaggactgaaaaactacgaggatgcatttaacaaaaaagttaagatcgacgatcaaaatcgttctgttcctctgttaaatacaatgtatcagaattttaaaaacgattggaatggtagctcaagagtagtaatgattagaagccaattaggaatgccgattgctgtctttattggaaatcacgtctcaattcataagagtgatatgaagaatgcaactcaatttgtgattgatggtcatcgtctatttgtttaccgtgctgattacacagtttatccaatgtccagtttaaaaagcaattaactataaaaagtgtcaatcctcattttaaggactgacactttttattatttatcatcaattaatgcattaaatgcttcattagtttcaacgatgtcgctcattacttgattaatccagtcattaagcttatcgttatcgtagttttctaaaccgccttcggaatctccaatgtccgcaataccattattgaaatctactagttcagtaattaacttttgagcaaaaatcttagtggtaccaccaaagtttttcgcaaaattatttacatccccatatgcatcggcaatatcactgaaaactgtgacagttttaccaaaagtctcactcaagttatctacatctgcttgagttggtacagtcaattcttcatcttcattattaagttgttcatctaaacgaacgccaatgtcgtttaacactaagtgaccatcatatagacgattcagtaatttgataccactagggtttttagcttggaagtttacactaatttcttctgtcatactttttcctcatctcacataatgtattttcatctattgtacaatttttagccaaaaaatacgactaaacaaggaaaataagcttttttcgattctttataaaaaatgttatattttacttgaacattagcaataaagagcataaaataaacgattgaaaagtgttgtaccatacaaacaacatatgtttgtaagtaatgtttgaattactaaatgtaatttgcccttacttactgacgagcaatcactgttgctataattagaatgctaagagttttctataagcgttgctggtattctagttatagtgacatgattatctaagttaaatttagttgcaatcatttttctacgttagtactatagatattcacgttcgaatgagcgcagtaattttaaattagactgttttttatcacctattcctgagaataggtgatttttttatgattaacgtatttgtatgatataatataaacattagttcgcaaaaggagtagatatggaaactgctaaatacctagaattgatccaaattgaagtaaataaattgcctgattttgttaagcaatttaatcttggtactaatcattcattaactactacttaccagtacttaactgaaattcgacgcttcttcgattggctacgtcaagaaaatatctcttctgcttcagataatgctcatgttactacggatacattagccaacttacgtcgcaatgacataatgctgtatattgattatttaggacatacccgtaataagcaaggccgactaaactcccccactacgattaatcgctcaattaatgctttacgctccctatttaagtttttaaccattactgccgacaataatcatggtgagccatattttgaacggaatgtaatgcttaaaattaattctttaaatgatacgcaaacacttaattatcgggctcatgtacttgaaagccacatgtacactggtaagttaaaatttgaatttttgacttttattgatcaggactatattaaccattgtaataagcaagcaaagattggttttaagcaaaacaaagaacgtgacatggcaattgctgcattaatcttaggtaccggcattcgggtgtctgaatgtgctggcgttgatttgagtgatttaaaccttaaggatgctgtactagatgtaactagaaaaggcggacaaaaagatagtgtaccaattgcagaatggacacttccttatatcaagcgatataaaggtattcgtaatgaacgctatcatgcagatagtaagcaagtggcattctttttaactcaatggcatggtcaaacgcggcgaattacaactaatgcaattgaaaaaatgatcaataagtattctgcagcttttggtcatccccttaccccacataagttacgtcatacggttgcttctgagctctatgaagtaactaaagatcaagtgcttgtagcacaacagctaggtcaaaaaggcacttcagccaccgatctatatactcatgttgatcagaaaaaacagcgtgcggctctcaatgagatctcaaaaaaaaatcacgattaatcaaattaaatgcaaaaacgagtttggctattcaattccaaactcgttttttattaatgtttcaatttcttgtaagcttttttggagccacgatctagatcacgattaaacttataatcttgccagtctttaacaaagagtaaatctaagttatatccttttgggtacaagtctttagctagtcgtcttaattgtaaacgtctgagtggtacttctacaaattcttttgtcacaaatatctttgctgcattttgggtaggaagatatttataaaagattccttcttcttttaaattggtagcatatacaatatcacctttatgaaattcttttttaacaaccaggttgcttttgtttttccgctggtgaacgaaacgtttttttaaagataaaggtaaattattgcccgctaatatggcttctgcttgatgcaaaacattttctggaatacctgattttttggcgatccatagtgctcgactattaccaatacttcctatctttaacttataagtaggttgcagattttttaagtcaaaatccattgcagctgtgataaaaccatcatgctgcttagcaaaatccttaatagagctgtagtgtgttgtggccatgattaaacagccacgtaaatacaactcttgtagaataccaatagcgagtgcgcttccttcatttggatctgtccctgtccctaattcatctaataatactaaactatggaattgagcatatttggtaatcatggcaatatctttcatttcggctgaaaaagtactcagagaattatctaggtcctggtgatcacctattaaagtaaaaacgtcatccattaatggaatatcacatggtttatcgcttggtaaaaacagacctagttcggtcattaaaatcatcaagccagtagttttaagcgcgacggttttaccaccagcatttggtcctgtaatcattagaacactattttcttgggttaattctaaggttaacggaacaggattaatgatcaagggatgccgcactgcacgtaaaacaagagaattttcacgattaattttaggcctaatacaattatatttttgtgcaaactttcccctagcaaaaatcatatctagtaaagtgattagttcaatgttacgcttaatatcatccttcacgtcgtatatttttgcagttaaagcacctaagattgctagttctagattacgtatttgtgcctttaaattggttatttgctgatttagacgaacaaccttagcaggttgaaagtagacggtttgtccaccattagaaacagccacaatagtccctgacaattgatttttgtagtttgctttaattggaatggtagcgtagccctctttttcaacgatcattgcgtctctaatcattttttgattaggtttactagtcaaaaaatgatttaatgcagttttgagttcagtaacagatttctttaagtcgcggcacatttttgctagttcacgatctgcctcatcgcgtacttgaccatgttcaatagtagtataaatagcatcttcaatgtctggcaatagcgtcatgtcttggacatatgcattgagtaatggtgctagctgctcatgtctggctaaaaagcgttgtagtaggcgatttactcgtaaaaattctgctactttttctagatcatcaggagttaagattagtcctttttcagctttagtaattaaatgctcgatatcctcagaactggcaaaaggaatgtgctgccgtaatttcaaaatcttcacggcttcttctgtttcattaagcagttgttctactttatgtaaattgctacttggttggacggaacttaattgttctttggcagcaatagtaattgcctgttgagctaagatatctttaacttgagtaaagtttaagttttgattattgttgatatttttcaatttgatgtaatttccttatgtttaatttaacgctgattgtaactaatggcttaataagtatgcttgcagacatatgcatttcctcgaatttctataatttgatttaaaaatgattgtaacataaaaagaacattaaaatatatactatagtaaaacagttattaaattaattcctatattttatgataaccatattactattgcctactatagcaattttactataacattcagcactagtatctcaactgtaatttttaattacaaatctattatcgtaaaaagggtaaacaaaaaagaccatagtttgtactatggtctatggctatttgttcttattttaattcgagcttatcaatatcaaccatccatgcaattgcaattgatttctctcctaagtgtgtagcgattactggactaaattcagctacatcaactggcttatctggaaagttttcattaacaaattgcttaatttgctccgcttgctttaaatcatttgagtgaaatacaaacaagcgtagcttatctttataaggcaaatttgctgtcttctctaaagttaatttttctaccttagaaacagcacgctttaatgatctgatcttatcaaaagcaacgatttttccttcatcattaaaagttaacaaaggcttgatttgaagcattgtcccaataaaagcaccggcattgcttaaacgaccaccacgacttaagtttttaagatcatctactacaaagaattcatcaattgtcttacgtatctcatctaacttctttaagatagcctctggttccataccattttttatcattcttgcggcagctaacaccaagtagccttgcaatctaactgtcatcttagaatcgtatggatataaattatattcaggattgttatgtgccatatttaccatattttgataaaagcctgagataccactggacaaagtgatagcgataatagcttcatagccttctccgtgtaatttattacataattctatcatttgccccatgctgggctgtgaagttttaggaaaagcagcaccttgtctctccatctcaaaaagctgggtggaagtgatattaacgccttctgaatattccttatcacctacgatgacaggaataggaactacattaatatcattatttttaacttcttgatcagttaagacactagtactgtcagtaactaatgcaattttcaatttattaacccttcccatatctaatttagcatagaaaaattatagcataaaaggcacctatcacgcaccctattccattttttctagggtcatagaagtatcagcgacttgatttaattgcttaataaataaattagcagcatctctgtcaaaatagacaaataataaattctcaatcttagtcagagttttttttagttctttagctttagtcacgccagcttcacttagattcacaatcttgcttgaatctttttccgatctagtgatattaataaagctcatagtcttcttttgctgcaattgacgacttaaggttgataatgaaatattaagcgcttctgccagcttccccatcgctaatgcttgatttttgttttcatcaaaaaatagcaaaattcgagtttgtgaaatatttaagccgcatttgtgatttatttcttttttcacttgatctgcgatcgtactaaaaaataatacatccattcgtatagtcctttttctccaatgtagattactatatacttgtattttatcatttaatatggcatttgataataccaaaaggctaatttatcagtaatattgtataatacaatgcactttttatgttgtaatatacaacttaatgatatagcagacctcgcgtgaaacatttactactgtattgcaggtttcaattatgattagctataacttataaatataatcattttagaatctgactaaaaattgatataatattacacgaactttgaggtgatatttatggcatttgatggattatttatccatagtttattaaaagacttagtccctactctggtaggtggtcgcttatcaaaaatttatcaaccatttgatcaagatctagtcttaatttttagaaaagatagaaagaattatcaatttttaatttcggccaatgcacaatatccaagaatgtatttgactaaacaaaacattgcaaatcctgataaagcacctatttttgtcatggttttaagaaaatacttagaaggttcagttttgcaatcgattgagcaagttggcttaggtcgaattgtcaactttcattttagtaatcgaaatgaacttggtgatcaagtcaagctcatgctttctgtagaattaatgggacgtcatagtaatgtcatcctttataatcaagaagacaatcacattattgatttacttaagcgaattaatcctgatgaaaatagagcgcgtgttttactgccaaaagcaaaatatgagttgcccccactaaaaccaggattaaatgggttgactctatcagaaagtgaatttaaacaattaagtagtgaaaaccagcctaatgaaattgctcaaaaaatggatggcttagataaagatgatcgaactgaattattaggctatcttgaagacgattacacttattcatcttttaagaccttttttaatcagtttgacaatccgcgtgcttttattttaaaaacacctagaaataagcgtaagattttttgttatttgccctatcatttagatttagagaaagaaagctctaatccagatctgaatgctggcttagatgaattttatgaatatcaggcaacacgtgattgggttaagcagcgtgcaggacaagttgaacgtgtagttaagaatgagcaaaataaactaactaagaaagttaaaaaacttgagaagcaattagatcttgctgaaaattcagagggctatagaattaaaggcgaaattttaaatgcaaatttggctcaagtaaaacctggaatgactaaagtttcattacctaactattacgaaaataatgctccattagagattaaattagatcctgctctctcccctgctcgtaatgcgcaaaagtattttactcgttacaaaaagttacgtgattctattaagcacattaatgaacagcttcgtattgctaaggatgatattcgttacttggattcaattcaaacagctattgacaatgcggatccacaggatattgatcaaattacagatgaattgattaatcaaggatatttacgtaaacaaaagaaaaataagcgtaggaagaaaatcattgaacgcaatttaaatgaatttaaactttcatctggtaaacacgtattggttggtaaaaacaactatcaaaacgattggcttactcttaaaaaagctaataaatctgattactggtttcatgttaagaatatgccaggctcacatgtgatcttacgcgatgatcagcctactgatcaagatattaaagaagcggctgagattgcagcttacttttctaaggctaaaaattccgctcacgtacaagttgattatgtgcaagacaagcgtgtgaaaaagcctaatggtgctaaaccaggatttgtaatctacactggacaaaattcaattgaagtaactcctgaagaaaaggaaattatgaataaaaaaattgaaaaataaaaatcatcgaactagttagttcaatgattctcataaatgcaaagtcatatcgactttgcattttgttttgcttattaaataggttgagtagttaaagccaatgattctagaacgtctaaaatcaattccgctgtttcgatacttgagaaaacaggaatatgtgtattcagcgcttcatctctgatgcgcgatgcatcttcgctagctgcatcagacaaattagtaatattaacaaccatgacgatcttatgttgacgaattttatctagtagatttctagggtctttatgaaccttctccactactccagtagtaatcccagcttccgcaaacatattagctgttccttcggtcgcaattaatttgaaacccaagcgatcaaatcggcgagctagttgggtcacgcgattcttgtcttcatctctgactgaaataaagattgttccataacttggaatatgtaaatcacttgcttcatatcctttgtataaagccttagctagttgagtatctcgacccattacagaacctgaggatttcatatttgaatcgaaagtattaccacttgaataattaagaaatgaaaatactggcattttaatatgaataaaatcgctgttttgccatagaccattaggatatcctagctctgctaaatttttgccaattaaagcttctgtagcacaagtagtgatatccttatctagtgattttgataaaaatgctacattatgacctgcatatggtttaatttgcaatagatataggtcattatcaacgaataaatagtgcagattaaaaataccttttgttttcagctgcttaattaatttaattgactcttgctcaatctttttttgctgctcttcggttaaattttgcggctgaatcactgcaattgaatcagaggcatgcgaacctgtttgctctagatgttcaattataccgggcaaagttacattggtaccatcagagatagccgttacctcatatttgtgtccctcaataaagcgagaaatagttatttgatcaagatgattttctgctaaatatttctctattgcaggaacatcataaacaactgcagatttttgcttgttttctttattcataccaccaattaaaagtggaaaaccatatttagaagcaaaagcgaaaacctggtctgtatcagttgttttatttaatgccgggacccgctttaaggtagtagattgttgatcaagcaaagtagtaatcttatcccgcggatcgtcgtttgccttttgcccaataacgtgcaaaccacatttttccaactctttactcaatgcactgattcttttgccagaaaattgaactaatacatcagaaatattttctcttttagcaacagttagaatattttcaactgtaatggaatcaaaataaactcggtcaatattcttataccttgatgaaatcgattcgtcattatttgatagaagcacagtaacatagccatacttatgtaaagtatcggccgcgtgagcaatcatatagtcaaactcgctagtaaccgaaacttgaagcggcaacatgcccaaaatcaagatctttttttcagcatttaaagcttgtgcttcattttgaacatcatatgcactgtagtaagcacaaacattaggtttatatatacctgctgagccgtcgatcttcaaatatgatggctgcaagtcaattttattaatcaaagagcgaacttcagtaactgatttttgtaaaatcttagctaataatgggttaaagaatccatagactttagcttcttgcagcaaatcacgcgaaggctgctccttctcttgtaataactttttgccaagtcttacaatgtgaagcaatttctgataataaaccggatgcaaatgtgttactttttgtaattcagaatatggaatatcttgatcaattgcggctaataatttaactaaatgcaattcatcaggatgtgccaaatcattcaaaatatctgcagtggatttttctttttcttttataaaagcatgccaacccaattctaaattaatagttgcatctaagcctttcagaaaagcagtttcaaaattacggcctacacccattgcttctccacttgcttgcatgcgacttcctagcaaatagtggttatagccggattcagcaaatgaccaatatggcattttaattgctactgcatctaaggtgggttcaattgaggcattaagtccagatagaggatcggtaatctcattcagtcgataaccgatagcaactttgctaacgacatatcccacatcatacattccaattctttgagcccaaacagaacttcgcgtcaaacgcggacgaatcgtcaaaagcttagatcgaatttgagttccatggtgtttaatcgcaaaatgaaaactagcaaatccaatgagatcaagattagacatgatttttctaacggttattcttaactcttgaatatgatcattgtttagggttaatgatggcatcacaactgcagagtcacctgaattaatacctacagcttcaatagatcccgcaaaattgataaaagctaaattgccatccttatcacggattacgtcaacaattacttcttcccaactagataagtcttcagttaagcgataattcttccatgtaaaattatcattttgcttttcttctttaaagtaactgattaaatcggtaggatttgcaaattgcaaatgttcgttgtgtacaaaacggttgtacttagtaactaatacgggaaaagtgactttgtcgttaatgctttctagcgcattatctaaattatcctgaatactctgattaagttcccaagattgcccggtatcaatatgtagcttagtaagcaactctgtctttttctgttgattccccatttgtagagcacgcgaattcaatgttagtaactgaattcccatttgttctaaaacgccatcttgtaataacttatgtgcaacctttaaaccattagttgaaccataagctgtcataattgcatctggctcttccatccgtagaattcttttcaggaagtcgagagtcatcggttcaagatagactgttacaccaagttttttatcagttgaaattgtagctggattaggattgactagcacaacttgaatgccttcttctgtcaaagcatcaattgcttctgttgccataagatccatttctgctacactaccgattaaagtagggcctgatccgataattaaaactttatctaaatcgttttctaatggcatataactaccccatcatctgtaaaaaataatcaaaaatttcatctgcatcattagtgcctggtgctccttcaggattaaaagcagtggcgatcaatttgtccttactgttccagaagcccgccatcagttcactgtgtagatcaaagtattcacgattcatattcatcttcacactatcaggcaacactagttggtcaatattcatcgctgtttgccagatagcattactattttgttcaatcactggataattaataccatcaaattcttgtggtaattgaaccagttcaaagccgagataatcgctcaaagttaaaaaacctaatccgattcctaaaattggatacttaccataaaaatgatctaaaactggcgttagctgattaattacttcttctggttttcctggcccatttgaaataatcattccttcaggacgtaagttttcaatatcaatcggactggcactgtatggtaaaactgtcgtatttacttttcgtaaagataaagcacgcagcattgagtgctttagcccaagatctagcacagctacagttcgtccaacattaggggatgcatatgcattcttagttgaaacagtcgcagatttatttttaggtaaaactagtgctttaatctgatcaaaggcatgctcgtcattagtatccatgatcgaagccttaattgtaccttcttccattaagcgatgaactaaagcacgagtgtcaactttgaaaattgcagggatgttcttttctttcaaaaaagaacttaaatcttcaaaattttcactatctgaaatatttaatgcaatatcgttagcaataatccctttaactacgggatcaatactttcataatcaatggcattaataccgttattaccaatcattggtgaagtaaagactaaaattttaccagcattagtaggatctgttaatgcttcttggtagccaaaattagccgtttgaattgctaattcaccggttgaaataatactggcaccaattccttcacctggaaatgaactgccatcttctaaaatcaaataccgtttcatattatcacttacttgtttgttctagttgagccaacgtttcttgaaaaatttgtggtggttctacactaaactctagccattcgccagtacttggatgtttaaatcctaatactttagcatgcaaaaattgaccatgacctttcaaggttttacgtggaccgtataatgggtctcctgcaaccggatgtccaatatagtcaagatgaactctaatttgatgggttcttccagtttcaagctgacactcaattaagctataatccttgaactgctcaagcaccttgaagtgagtaatagcttttttgcctgtttcaactaccgccattttcttgcggtcatatggattgcgaccaattggtgcatcaattaccccattttcttccgcaaaattaccatgaacaattgcccaataaagacgtttgttagtcttatgagccaattgatcttctaatgattcacgagccttggcggtcttagcgatcattaataaaccagatgtatctttatcaatccggtggacaattccaggacgaaatccttctggtgattgtgctaaggccttggtgtgatataacaacgcatttactaaagtatgatctggatgacctggtgcgggatgcactaccataccttgaggcttgttaactacaatgacatcatcgtcttcatacacgatatcaagtggaatattttcgggtataacatctaacggtttaaccgctggaatattaacttcgattttatctcccgcctgaatcttataagatactttttcgactttgccattaactaggatattttggtctttaaccagttctttaactctagttcgagatagatcaggaatttgttctgcaacaaacttatctaaacgtcccttttcgttttttacttcaagtgaatattctttagtcatgttgttcttccttaccttcaataaaaattaagtaaatgaacacaaggattactccaacagtaattgcggaatccgcaatattaaaaatgttgaagtgaacaaaatcaagctgaagcatatcaactacatattttaaatgcaaacgatcaataaaattaccaacaattccacctaagatgagggctaaacccacatcaaacaaggtattcttgtactttttgttaaaaagaaaatacaagcaaacactaatggcaataatactgataatgtaaaaaagccacatttgaccagttaaaatgttccaggccgcaccattattttgcaaataattaaaggaaagaagcccaggaataatctggtgtacttctcccacagcataatgggcaacaatataattcttaagtccttgatcggcaagaaccacaactaatgaaataattaaatataaaaactgcatatctttttagaataatccgctaattttaccattgttatcaacatcgatatctagggccgcaggatgcttaggcaaacctggcatatctagcacatgacctgtggtaaccacgataaaatgcgcaccattttttaaactaatccctttcacatgaagcttaaagtcagttggagcacccaattcgttcttgttgtcgctaaatgaatattgggtcttggcaataattactggtaattgggccttacctaactttcttaattccgcaatttgcttttcagccttgtcactatattcaactccagctgcatgataaatcttggtagcgactttctcaatcttgtctttaacatcgtcatcatctgcataagttggagttaaatctgccttgccagagttagccaaatcaacaacagcttgagcggcttctacaccacccttagaaccttcgccatgataagtaactacttcagcattaataccttgttcttcaattaattgtttaagcaaagcaagttcttggtcagtatctgaagcaaaacgattgattaacacgatgaccggcacattgtatgaacgcatgttgttcatatgacgctcgaggtttttaaaaccttcttttaaagcatctaggttttcttcatctaagtgatcagttgagcctaaagcttgatacttcaatgcacgaacagttgctacaactactgcagcatcgggcgtcttgtccagatgtcttgagacaaagtccatgaacttttgcccaccaagatcactaccaaagccggcctcagttaatacatagtcgcttaaatgcaaagccaagtttgtcgcaatgacggaattggctccatgcgcgatattagcaaaaggccccccgtgcactaatgctggtgtgtgttccaaggtctgtactaagttaggcttcagcgcattagacaatagtgcagcaattgcaccttggaatcctaactgtttaacataaaccggttcatcatccttagtgtaaccaactagcatgtcaccgattctactctttaaatcgttaatatcagttgccaagcagagaatcgccatcaattcgttggctacagtaatggcaaaactagcttgatgttcaacaccattaaacttggagccttgaccaaccgtgatttttcttaaagcacggtcattaacatcaagcccacgcttaagtaaaattcggtcaggatcaagatttaggctattgtcttggtagatgtagttatcaactaaagctgcaagtgtgtcaattgcggcagttaaagcatgcatatctcctgtgaagtgtaggttgatatcttccatagggatgatttgtgctttcccaccacctgtagcaccgccttttaatccaaaaacaggtcccatcgaaggttcacgcaaggcgatcatcgtattctggtgcaactgattgtgaattgcatcccccaagccaattgtaatcgttgacttaccttccccagcgggagtaggagaaattgacgttactaatactaatttacctaactttttactagcacgagtcctgttaatggcttgccaagtaatcttagccttatcatgaccataaggttctaagtcttcctctttcaagcctaccttagcggctatttcattaataggtaattctttggtttcttgtgcgatttcaatatctgatttcattattgcttattcttctttctagacatcattaaaacagaatagctttggtaatcactttttagttgataaacttgaaaattacgccaacttgaaagcaaagtcatttgattgatttttacttttgaacgatatggcaacttgagtaatattttgtctccacccttttgcaagtaagaaaaggaccaagtataaactgctaaaagtaagaaaatgataccaactactattccaggtatactaattgctttgttcccttcatagcccaaaataaaggcgataaatagaacgattaagagccaagaataatagataattcctgcaactcctagaaacatgaaatgccgtttagattttagaatttagatcacaccctatttatttaatcatgtctattgtatcaaagatttaatcaaaataagagggttgaacttacagcaattaaatataagtccaatcctctatcacatttatttactttactactgctatttcgtctctaacctttatattgcttgaatcgatgccaggtttttgaccgtgaagattaaagtctaaatcaactgtcggttgaaacagtaaatgtactcattgaaagctcagtagccttggtatttttcgctgcttgaccccatgctctcaatactgcttcgggaattcctttagcattagtcaaatttacgttacttaatttattaccaacatggccgaaggaatcaccattatcaccaatattattaccaaagtttacattgcttaggtcaatattggataaattactatcgccatcgaacaaactagcaatcgatttagcattagataaattccaaccactaatatttacagattcaagacttttatcatgaccaaatgttgcataaatattagtaacacgacttgtatcccaaccacttaagttaatactttttacatttggaatactagaaaataaaagtttcagattagttacattggaattcaaagttgtagtagttaaatcaatggcagttgcatttggttctttattgcttgaacgtatccattaactatttctctagtaatgttgcgggcatttgttagatcaacatcagttaaggcattattatgtgcaaaaaagttccaagcgtttaccacatttttgtatacagtatcgcttagatcaactttcacaagcttttcagcgccactaaacatttgtgacacgtcactgaattgacccatattccagccagcgatgtttacattttcaagattcttgtcattttgaaacatagatctaattgcagtggcttcactaacatctaaatgacttagatcagcagactttaaagtgtcactgttcattaaggctgcggtcatgtcacccttagcataaactttgttcttatctccctcactgtcaatagtaatgttaactgcacctgcatctttgatagtttctaataagtctttagtgatatagactttatcatcagtagttattgttcctgcattgataaaatcttgggtattagggatgtaaatatttttattaccagtacccttatatttagttaaagtgtattgatgagaattttgatctaaacttccatcccaatctgcagtgttgtactgactattttgagtggtgttagcttgtgtcttactagttgaagctactgtagtagcttgcttattggtagaagtcgtactctcctgcttgttttcattagtagctatcttgttcttactttcaattgatgatccgacatttgagttatcatcgattgaattgttcttagtagttaaatcagtatttgaaagatcaactttgttagtcgattttgtcttcacaatactagtagtgtcttcagttttattggcaccatttgtatctacattattagaagttttagttgtggaagcaacttgctctgtagtagtttggtcctttataacactggtagtagcactatcagatgaatttgcatcaacactatcagcatgtactgtttgactagagtaactcataaaagtcaatccaattagtacagaaactgcaccgattgttattttacgaattgaaaaacgttgtttaatagaatcaatattattgtttctaaggaaatatcattaataaaaaatgaccgagaaattaatctcagtcatcttcttatcaataagggtatctcatttctactaccctactcgactagtaccattagcataattcaaagttacgccatcttgcacgttgaaaatgtaaatattgaaatgaactgcatttgagttaaccgactgcccttccatttcaactccgcgagccaatagttcattgccacgaaagaccggtgtcacacggtagcggacgtagttgcttcgactttcttttacataatcagcaacctgatcctcatagcgcaacatatcaggatcatttagctgccttgtacctgtcatcaaatttttaatgttgttgttctgtcctgttagctgataaccaatcaaatggcagcgattatagagccagccgccagcaactcgtttattatgccaaccagtaggatcaacatgtagtggttcgcgtctagcgcttggcatcagcgactgaataagcaatgcgtttgcggcagttacccgattcaaaccatcgaggttaccatattcttgccatgctccgcgattagtactcaagtcactcttagaaaaactaggatcgttgttatttactgtaatgatgtttttcccagaatagttaagacttgccagttttgcggcactaacagattcaatattgtgtttgccagtgtacttcttgagttctttgcgcagtttagcaatctttttgtctaggctaacaattttcttttcagtttgcttgttttcctgcgcaatttgcttggtctttttctcagcactgtggtcatatttgatgatagttttaaccttggcgatgacattttgacttagactaggattagtaatcgcaccatagccgccaaacaaaaacaacgtacttgaaacaagtgtaataattttcttcttattcatcacctttttgcctttctgtaaccagcattgattgcatcctgctcactattgaagtaaaccgcatttgcggaattcatatgatagcctgcttgtcctggtacgtgataaatcttagaattgacgttaccgacaattttgccagtttctgctgtatctaggtctccatgattgccgccaccattagaatgatgtgttgcagttgaacgactagattgagctgactcgttttgccgtgattgttttgctatttgagtagcttttttagcagctgcttttgcctgttctttttgctccttctcttgttcttcttttttatccttagcatctttaagttcggagcttagcttatcgtactcatccttcttcttcttttcttcggctaattcaaaagtctgctcttctaagacttcttcatcagtagtgcttttctcttgaaacttcttctggtgctcaatatatgctggttgagaatgtactaattcacgagtgatgtttagaccatatttatttaatagcagtttttcagtatcactaattttataaatacttcttcttggtgagattagtaaaccagctaattttaaatcactaagcgcccaagctactcgactaattgctactaaatcatgatatttagaaggatatcttaaattaacaagttcttcaggtaaattaatctctgtgacaacagcttatcaagctctctacctacccattcttctttagtactcgctacctctagcatgggacctaaaaatgcatcccaagttggcatcccattttcactatgttttaaagttttgtagtcaatcattttttatctttatcaacttaggcgtattactgtaatgtgttcgcccagaagcttttatattaagattgactggttgcatcaaatttacgctagtcaatattgcctctcctgactttaaactcgacaactgagctaatttgtctttatttaggaaattattgattgctttaatttcatattcaccagttaaccgatgcattaaaagtgttcctatctgatttaatactatagttggcacatctttggggctttgagtagttaaaaatagaaatattccattttttcttccttctcgtgctaacgtagccagaggagaaataaaatcatcttgagcatctttttctaaagcatatctgtgaacttcatcaacaaataataaagttggatgttttgtcatatcatgatttaataagaaattacttatatagtctacaattacttgtcctaatccaattgaaaatttggaatcatttaaacgtatatataatgatatgtcattaccttgaaattctaacatttctttattaaggtctttgagtatctttttacctttatctgtttctccaaaatccttatcttgagttttactatctacgtttaaaaataactcttttagattatacgtcttaatcaaatattttactttacgtattagccaagaattagctccatatgtaaaataatcaaactggtaggttccttgttttatacctttattccaactaagttttaaagaatctttctcaatttgtttatctaaattgtttatatcaaatgattcattaaaaactttatcagattcccactgaatctgaagatgcttgtactgttcttgatttgccccttcacagtcaagaatatcatttcttataaatctattctctgcctcggttaaatttaccttatttaaatgctttttatagtattgaacaaattttaatttttttattgcctctaaaagctcaatcacttgggaattatcatttggcctaaataaagaaatccattgttcatcagtcaaattagcagtattcaagaataaatttttccctattgtttttaaattaacctcattttttgaaaatgcatctttatattcaccagttggatctataatcaaaaattttccttttagcttttgatatttatctaaaatcgctaatgcactagttgatttaccagaattcgttgctcctacaatcataaaatggtgattaaataatccatcaacactaattttgaatggaatagctttcttttcatttaaattaaagcttgaaaattcaatttgattatcccttttattaatttctaatgaatttatatatttcttaatagcttcatcattacagatatatgccttatcaccaattcctactgttagatctccgggcaatacaaacgtatttttatcgtacattgccattagtttaatttcaatatttgggtaaataatatcatcattattttctattactgccttatgaatattatcagtattattaatcctagaacttattactttccctaagaaaattggagactgtaaaatagtttgtgtaaggatgaatgattccttaaatttatttctttaaacattagaaaaaggagttcctttctcgtatgattggtttgaacaaaaaaacacatacagaaagaagaactccttcatgaatgattttaccaaagattttgctcaagctctattcaatccagacaaaataaatgatttattgcgcaaagagctacaacaggctgttaataacttgttagaagctgaattgactgcctttctgggctatgatccctatgccagaaatggctggaatactggcaactctagaaatggtgcttatttccgcaaagttgatacgcaatttggcccaattgaagtgcaagtgcctcgggatcgcaacggtcaatttcatcagcacacgctgcctggctacaagcagcactcggatatcttggaaagcatgattatcaagctttactccaagggcgtgaccaccagggaaatagccgatctaattgaaaagatgtatggcagccattacagtccagctcaggtatcaaatatttccaagcagatgattccaaaggttgaggcttaccacaaacgcaagctaagcgacaagtttttctgcgtctatttggatgcgacataccttcctttgcgccgagaaacatttgagcgtgaagcagtctatattgccattggcatcaagcctaatgggcacaaggaggtcattgactactgcattgcgcctagcgagaacattgaagtctggacagagatgcttcaaaacatgaaatcccgaggcttaaagcaagttgagctttttctttctgatggtgttgttggcatgaaaacagccttggccaggacttatcctaaagctcattttcaacgctgtttggttcatgtcatgcgcaatatctgcgctaaagtacgcgtcgacgatcgtgaaaagatcatgaacgaattcaaacaggtgcatcaacagacaaacaaagaagaagccacagctgtcctgcatgacttctataccaaatggggcaaggtttacagccatgttatcagaagcttgaaagacatagaaccagatctgctggtcttttataactatcccaagcagatcagagcttcaatttattcgactaacatgattgaatcatttaacaatgtgatcaagcgcaaagctaagcctaaggcagagtttccaactgaacagtcgcttgatgcttttattggcattcaggcaatgagctacaatgaccgttatttcaatcgaattcataaaggctttggtcaggttcaggacaccttagaatcctactttgattaaataaataattaaaaaatcaatttacgagaaagaactatttacacaaaagatttgacagtttcgaaaattgtgccattactatcaatcaaaacatgataattaatagtattagggcgtaaaacatcactttgattgaagcgatacttcaataaactcatgttttctatttgaatattagcaaaaatagaagatacagtagatattttacctaaatagtattcacatttgtctacatgcaaatttttgtctgaactatcaaaaaagttatttatcaaactcatagttatcccacataataagataaatcataattataactacacattgttgctttaagaaaagcaatattatatcctcgatctctcaaatcatctaaatcactccagttgtcattaacatcttcttgttctgtttttttatcaaaattatgaatattataatcagtaatcaaacaatctaaacttgagttatgcttaattgcgtttataatcattctacttatgtgattatcaccaaaactaaaacccgaagtaactaataatgtattaggttggtgcaacttattttgaaatcgagacatgagatcaaaatagggttcctcatagctctgagcatatttattagaacttggaaaaatcatttttacatgattactgttatctctaatcgtactttttacctcttccacagtcgatttagtaactttattttctttttcaatccaattaatagacccatgaattttaagaagatctataacatgctttttatagataacttgtttagtattaatattgttaacttctttactcaaaacccactcatacatatcatcattgaattctttattatttccaaattcaaatccatcaaatattgtgaagttatctttttccagagatttttcaattgctaaatcataatttgtagtcgcaaccatcaatttactgctatccgaatgaattaaattaagcaactttaaaatcactttatcatgcttaaatggcattttagatgtactatcgaaattataatcaactgaatcaagtattgatagtaaaataaatctttttaatttttttgcttgtgataaacttggatttctgacttttttaccagacatctctgcgtcttgaatatataaatttaaatttgaaatatattcttctaatggaaaagaaaaccatgtactttcatcatcaaaattaactttttcaaatttttcttgttgatctttaggtaaaaagatcttagcatccttttcatctaaatattcttctaaattatttgttccataaagctgattgaaaatattccatgaaatatcttgcatagtctttccataatttgaattaatatttccattctcattagttacaactgaagctccggcaccaactaatagcacaacattactataatctttacttataaaacgcaaaacagcccttttgagaaacttatgaagttgcttttctaaaaacacaaaatcatgatcattatcatcatctggatttattttatctctataaaatttacttagtgctttctttttatcttgtttattatatttatcaggtaacgataactctatatctatttctttatctctgtacaacgagactgtaaaatagtttgtgtaaggatgaataattccttaaatttatttctttaaacattagaaaaaggagttcctttctcgtatgattggtttgaacaaaaaaacacatacagaaagaagaactccttcatgaatgattttaccaaagattttgctcaagctctattcaatccagacaaaataaatgatttattgcgcaaagagctacaacaggctgttaataacttgctagaagctgagttaactgcctttctaggctatgatccctatgccagaaatggctggaatactggcaattctagaaatggtgcttatttccgcaaggttgatacccagtttggaccaattgaagtgcaagtgcctcgagaccgcaacggtcagtttcatcagcacacgctgcctgactacaagcagcactctgatgttttggaaagcacgattatcaagctctactccaaaggcgtaactaccagagaaatcgctgacttgattgagaaaatgtatggcagtcattatagtccagctcaagtatcaaatatttccaagcagatgctccccaaggttgaggcttatcacaagcgcaagctaagcgacaagtttttctgtgtctatttggatgcgacataccttcctttgcgccgagaaacgtttgaccgtgaagcagtatatattgccattggcattaaacctaatggacataaggaagtcattgactactgcattgctcctagtgagaacattgaagtctggacagagatgcttcaaaacatgaagtccagaggcttgaagcaagttgaactctttctttctgatggtgttgttggcatgaaaacagccttggccaggacttatcctaaagctcattttcaacgctgcctggttcatgtcatgcgcaatatctgtgctaaagtccgggtggatgaccgcgaaaagatcatgaacgaattcaagcagatacatcaacagacaagcaaaaaagaagctgcagctgtcttgcacaaattctatgccagatggaataaagcttatagcaatgtcatcaaaggtttgaaggaaattgagcccgatctgctggtcttctacaattatcccaaacaaatcagagcttcaatttattcaaccaatatgattgaatcctttaacaacgtcatcaagcgtaaagctaagcctaaggcagaatttccaactgaacagtcgcttgatgcatttattggcatccaggcaatgagctacaatgaccgctatttcaaccgaattcataaaggctttggtcaggttcaggataccttagaatcctattttgattaaataaatgattaaaaaatcaatttacgagaaagaactatttacacaaaagatttgacagtttctgtacaactgcatacttaatctcctcgtattatataaattcatctcttaaaagttaattctaatatataaacaaattgtcaattttatcaacaattctattctgctccgctaatggtggaagaggtaatttcaaattaattaatttactcaaatatattcctttttgggttgtccctttcgcattagcaaaaatttgagttttaaacattgctgaaattaaaacataataaagaaacttacttaaaatattactactaataaccgcaacacttctttgagctgtaaaaagtttatcagtatcaacaactgcagcattacctaacgagcctacaatagtgagtaatacatctccctttcggatgtttgttcttttatcctcttttaaaaattgatcttcagaaacaaatctatttgataaagaaaaatctatttttccttttttaatgtttattgcagagataacttgttttccttcatgtgaattcggtgggggattatgcgtaccatcagtaatcctttttgcaatattccccaatctaacccattcccaactatcaggaatatcaaacggcttttcctcatcagtgatcggaggcaacggcttgctcttcttgatctccttttccttgatcatcttccgcttctcagccttaatcttctctagcaaaacactagctggttcatcatggggatcttgctcgactaattttccacgcattgccaaatccagcaccttcgacttcagcaaagtctgaagttttgcgtattgttgagtagaagattcgactttgcgaagcaaagcgaatagctgcgctattttagcagcgattcgactttgctcttcaagtggtggaagtggaacaagagtttctttcaacttttttgaattaattgttggtacagcagatccttttacaaagtcttttatgtccaagcttaaaaacagatagaatatgaacttgtgatttaagtcattgtatggtattaatcccccagtattaagatcaaccaatgaatcttgagacaaaattcttttttttgcggttaatatagctccaccgtttttaggaaaaataattgtatttttaggcattacttgtcggctatatttttctccaacccaatttttcacgttttccatatataagttattattattcatatctttaaccttaaagtatggataaatattatcactacttatgtcttctttcttgggagtttttccattttttagtaaacctacatcccccaatctaacccattcccaactatcaggaatatcaaaaggcttctcatcatcagtaatcggagcaagcggcttacttttcttaattttcttttccttaatcaactgctctttttcagctttaatcttctcaagcaatacactagctggttcatcattaggatcttgtggcaccagctttccgtgcatggccaaatccaagattttttctcttaaagcctgtgcatcaaaatctaaagtattagtcttcatcgtcaattccttctaacgccttattaagttccgcaattgcatccctaattgccttagacttgtcattcatctcatctaagatttctttcaacgaacggttatcgtgctcttcttcatcattcatccaagaaatatcaaggctagtattaggacgcttcaaaatttcatcaatcgtaaacttgcgccatctaccgttagaattcttctctttatcccaagtttcttttctctttgagcgatcgtcaacgcagaatagtttttcaaattccgcaaaatccttgtcacttaatggattacgcttaccaaatgaccgcatctgatgacgcatatcataaatccaagtttccttggtattatccttgtcactttcaccgcgagtaaagaataatacattggtctgcacaccttgagcgtagaaaatcccagtaggcaatctcaagatagtgtgcaagttgcacttgttgagcaagtcttttctaattgcttcgccaacaccatcggcaaacaatacattatctggcacaactacggctgctctagctttaccattgtgtttaagtgaattgtagataatctgcaggaagttcaattgtttattactagtcttataagttaggtcgtcacgacttacactgtcgtcactacccttcttggtaccaaatggcggattagttaaaactacatcaaaatctttcatccatttaccatttgaagataatgaatcccctagttccaatcgtccatccatgccatgaagatactcattcatcatggctaaacggtgcgtggtttcaactaattccataccagaaaaagcttcttttacttgaaattcttctttatctgcggacaaggttgaataatcatctgtttgatcttttaaatatctgtcagctgctaccataaagccaaaagtaccagcagcagggtcattacagcgatctccaattttaggctgagtcattctaaccatcatgttaatcaacacacgtggggtaaaatactgacctgctccagatttgacttcgctggcgtttttctccattagaccttcatacaaatcaccaaggccttcgtcacgagctgaccaccaatcaagtgcgtcaatatcttttattattttttccaggtcagcaggtttgtgaattgaagtagaagcatcagcgtaaattgaattgattcttggactattaaccacttcaggattacctaaatcaagtaataattggcgataaaagttacttaactctagtccttcctttgaaacaagattatcccattgatatttttgggggatatcatcctgttcaccttgttccttactcatttttaagaataagatataagttaattcagtaatgtaatcttggtaactgacaccatcatcacgcaaaatattacattcattccataacttttgaacgatttcttgattgttcacttaattttgctcctttaaaaattgtctcttttgaagatttccggtagatatatttgaatattagtaaatggatcatcattaatccagtcactctttttccgatacaacttattggcgtgatctactgcatcttgcactttatcaaaaatatattctcgataactattacctttaaagcgactataatcttgattaaaataggcagatctagacagtttctgtactagctcttttctagtataagaacgagtgacactttcaaaatgcattaaaatccaaatttcaaagtctattgaagaaaacataatagtaatatcattttttcgagcaagtttagcgcatttccttaattcatctttagaatgctcatctctatcgaaaacaacataagttttatctaaatgattatatttgccaaacttaactgctttttctactagacttttaccagacaaatctgcagcaactattttaactttaatatttgctaaacgatatttctgcttaagcatagtaaaatattgtttttcagattcaccttcacacagaattccaataattggattagacttagtcttatttcttattcttcccatgctcatccccatatttttcatgaatcatttgcaatacatctagcaaaccatctacatctattacaggaactgcaccgaatcggccttgtaagtatctcttagcaaacgaaatatcatgtcgacctttattacgtgcatcttcaaagtcaaagattgatttcaaatcactaattccgtgaaaatccttgtctaataaataaatttgatcaattcttaaatcgctgtctaatagctgaatatcatgagtagtgataataaactgattcaaattttctgttgaattaaaaatacgaactaaagcagctgcaagttcaacatgcagtgaatcatcaaattcatcgattacaatcgtcttctcgttaccattcatttgagcaagcatcattgctaatactatataaaataaacgacgtgtaccaacagactcttgtgttaatggaagttccccagaattaataacttcattttgatgataaatcttgtgaaccgtatatagttctttagttgttttaggataatcaatatttaaattctctacaatcttttgtaattgtggattcaacggattagtaggtacttctctaattctaatatcagagatattaaaatccgcaaaacttaagaatgagatcatttcttttttgaggtattcatcttccatcaaatttaaaagttcgtcaggaatatttactggatagccgctgccaataaaaatcagatcattaacaaaccacttatagatagcaatacaatctgcatcattttcagattgtgctaaatataggaataaagaattatctctaagcttaggaatgctgtcttccaaaagcttgttagagacttgaatgtcatttccatttcgagaaaaaatttctttttccttgttaccactaattaaggttaatgcttcactggtaatgctctctcgattgtaactaaatgaatagtcataaattttgttttttaactcaagcttcacttcaaagtaagtatcttcaatcttggacttttcatcaaacaaaaaaggataataatttaacttatcagttacggcttgagttggacgtgttactattccttccattgtttgtaaagcttgaatcaattgagacttacctgaaccgtttggaccaaataacagtaagctttttaataatgatggatttttacttgagaaagtattagtttctttcaatttacgtagtctattgcctgtctctgcagacaaggtagtgcgctctctaaaagaagcataatttttaacagtgaactcgattaacatattgtattcctccgtgttaatttaagtttagcacacgcctttttttatcacaacttttcgtgattaaaagcaaaaaataccagtaatggcatttttaaacatataaattctcattcaacacgtaaataatctgatcagcattttctggaaagatcttcttaatttgcttataacccccgtgacgtttaaagaaatagttatcatcaaaggctttctcagcatttggccccaatacagtagatgaaattaattggttctcaattctcttcaaccatttcttttgaggaatagtccaatcagctaaaccataaactttttgcatggcattatgaattctaacatcatgatccaccaactcagatccagccgcagcttgtctaatgaagctaataatatcggcagtggtctgaacatggttaacgtttttccatgcactttgcaaatcattttctttaaagccattttgctctagcttaagtttaatatttttgagttcatcaaaagttaaatccttcggtctagtagctacaacttgtaaggctggaatagtattgacgttttccttaacgaatttattgaagttttcaatataatccgctggtttttgattgccatgcccataacctcgacttacattaattactttgtctactgcgtctgatattatttgcttgggtttgacaggtttgatgtgatctaactgctcaaacttaggccattgctttaaaaattgggacttatctaacttacttaattcacgggcccattgatcaaccgaattaatctcagctagatgttggaactcatcacgtttagtatcatccaaacgtttaatttttctctcaacggcaccagccatatctacttgatactgagcggaatcctcatttgtctcaaagaaatcatccttgtgatttaagaagtagtgaacattatgtcctggatttttaacaacaggcttcatgtttgtcactttattcattgcttcatagattccgacggcatcataaatcgtaaatttggatttattaatttcgggacaaagtctggttgcccgtcccaacatttgctcatagaggattcttgactgaactcttcttaagaagacaatactagtaatttgcggtacatcaattcccgtagttagtaaatctacagttactgcaatattggggttggtttcattcttaaagtttttaatttcttgattaggatgccgaattgaaccagtaattttttcgatagcatcgtcatctacaggattactcacttttttgaatgcttttttcaataagtcaacaaccatatcagcgtgttcatcagttgccgcaaagattaaagttttacctaaatttggatcatttggatcaagatatctttgagctaattcatcacaaactacttcattaaagctacgtgtgataactctcttattaaagtcttttacatcaaaattcatattatcaggtaatttttctttattgatagttttttcatcctgatcaaaaagactaacttcggcaccctttttaaaatgaatcccttcttgagacaattgagtttgaataattactggtgcatcatgatccactaaccagccatcgaggacagcttgttggtagctatacgaatacaccggtttgccaaaaatatcaatcgtttgtaaagctggcgtagcagtcattccaatagcagtcgcatcaaaataatcaactacacgtctatattgactaacataatcttcttgactatagaattgatattctttatcgctgagctctttatcttctgcataaccacggtgggcttcatcaacaataatgaaatcatattgaccaacggatggcttatcatcactgtcttcactgaaaaataggcgtttgatcatcccctgaaccgttgcaatttgaatttttgttgatatttcaggtgccttatcactcaattcctttaatccataaatggaagaaattgacatcgtacctattttattatctttaattgcattggcagtctgctttcccaatgaattacggtcaactaggtaaagaatacgtctagctctcttatgcttaagtagtctgtacatcaaagcaattgccgttctagttttaccagtacctgttgccatggcaagcagaatacgcttttttccatctttgatggcattttccatcgcttgaattgcagcaatttgatattcacgatgtgcaaaatcaggaaaatcttgatcatctaccaagtcttgatttgcttcttctttatttttagcagaaagcttcaacgataaatcttctggcttatgaaattcctctagagcatatgcgctttctttatgattacgtgcatcccagaaccaaataccagatttttcctgatattgtttaagatatggacgaccatttgcagtatagatgaatggaactttgtaatcacccatttcatttgaaactagacgataatctgatctaaacggtacctctttagaatattccttaggctgtgccatttgccctacaatatcttggtcccactttttggcctcaacaattccgtagaactccaaacctttgaataatgcataatctgctcgctgaccattaggtagaacccattcagcaattgccatattgtgacctttttgcggttcagttttctgcgtccaattgttcaatttttgtgaatctacttcccagcccgcatctcgcaattgttgatcaattaactgacgtgtttctgcttcagttaactcatgttttttagcaaattgaacgttaatctggcgtctgcgttcacgctcttcaggagaaattatgacttcctgcaccctattttgttgtaattgctttatcttttcttcgagagctttgattttatcttcttgagttttaattaaagctttttgatcttgtggctcaacataatctgcaactttatccagagaataaacttctaaaaaccatttccataccaaataagcactctgatcaatttcaagcgcaatcttttgggtagcaataaaatgatcgtcatgcgttgccttgttccgtcttaacctgatcaaattaagagcattcaaaacagtaggtggatattcattcttagaatatgccattttttcaattcgttgtttttggtttaattcccaatcacctaaatcatccaaatgcatgatttccttagttaattgctcaccaaaagttccgaaaactgtcaaactacttctaggatcagagtaaattaagctttcagcgctggaagccaattttgcgtattcttgataatctttttgtgaagtttcaaagttagacattgtttttcctctaaatattaaagtaaatatagttttattctaccccgaagccccatttaataacaagtagtgtaggtacaaaaaaagaagcaccaacacagtgcttcttttaacataaactaaataatcaatcgaaccctacttcgctaaaacatattcaaatcccaacatattggtatagcgattactacctatcttaatgtaatcatagcctttgatcctcttggtgccataagtttggacataattctttgtcctggtattctttgacttgatttcgtcaacttttttaccctgggcatttaccacaggtgttacagtttggacagtgtagtaacgtttgaccacttttagcttagatgcttcgaagttgccatacttaacgtatttatttgcaccaatcttgacatatttttgccctttaatagttgtaatggcttgaatcttataagaagtattcttcttcaacagctttctagttttcacacctgcagcggtataaacgtatgcattactttgcaatttctttttcttgccaacagtaatgccatcagtgattaatgggctaatatcgactttgcgctttctaatggtatctgaagaatagccaaaccaaaatggactcttcttggtaacatcccatactggacgagttgttggatattgccaattacgtttgctgttataaagttgaacgttaagtttgcctgtaacttgcggctgatagtaattgtagataagattcaacactttttgaacctcataagtagttaactggtcagttcgtctaacaagtaattttttaccatcaagtgctttggtgctattagttaaaaacttttctgcttgactaactgcaatttcactagcatctgcatcactagcaatagccttagcttgctgtaaataagttgtaaattcaatcttcttatcataatcagctaactgatagcgatctgtcttttgcacattttctgcagtggagattgcagcagtcaacgatgctttgttagttgccactttagcaagtgactctgcttcgccagctgtgtttattggtgtaagcttcacaccttcaacctttttgacatcactagctaagatatagccttcattatctaacttattagtcttagcattaacttcacctgttgtatggtagaaaagttcggctttcttttcacttggcacccaaagataaagggcttcgttaattttatggttgctatacattgcagtttcttcaaccgtattggtataaaactgtttagatagctcttggctagttttttcaccgtcaacattgtacaaaggaatctttttatccaagacaactttggtagaatcggccaattcaagatctgaatgattctctaaagcttgtggcaaattcagatcatcttctgatacccaataattagtgcccttgatccggtagtatgaatagtgatcatgatcaaagtctgtcaattgttgtgggaattgtcccgcataatcaactgtgatcttttgtcctttcttcaattcaatattatttggatctgtaccccaacctgttgaattaacatactttgtaatggttgaagtattcttattgaccgttacggtaattggtgcatgagtagtaagacgatagccgtcaatgtaaccgatgttggccaccttgatataacgaccggaacctaaataatagtagtcttttccattaattatggtataaggaatgcgatacttacctttttgagcctcataataatactttgctttactactagtagttttccgcttaccagcatatttgactacgctaccctttttgacaaaaccaacttttttgccagacttattgtaaatattggcattaaaaattgccgttaaataagcagggccagatattggcgttacataatctgaagaaatataaacattcttgcgtaaaggatagtataactcaccagcactgtagtcgcctggatcaaccgtcttaaaaaatggttttccatagtatttaatcgtgctgcctttcttaggtgcagaaatatgatccaaataattgcccgagcgattgtacaacataatatgtgaatcaatgacttttaaggaaccagttgcattgcttttagtagctgcggcaactgatgtttgaacgtttgaagttagtggtgctgcggcaattggagacacagccaataacgcagtagaaattaagataagttttttattgattttcataatgaaccttcgatctaataaatgcagttaagatttgatcagttagtactcatatcatcattatagcagttatagttatttattccttgatattgagcctatcaaaaaagagatcgaaacccagtgtctcaatctctttcgattttattttgttttcttcttacgagtccataatccacttaaactcaagccagacagtaataaccctaaccatgaaagatcactatcttgcctaccggttgctggtaaaacagacttagaggccgatctcggcgtaatttgttctactgtatcgtttttcataatagaagtttccgttttacagcaactaatctcactaccacttaagcttcagtttatggctactttgctctacctgtaaaaatgaatcaacgtagcgcttaaaaccaggtaaatatttggcaatcaaatgatattctcgtgaattaacaatttctttcttttgggctgcagaataattactttcacctacaaaaaagttccaattcaattgatctataaattttatgaccacgttagcatcatttttatctgataaagcttgcgcaatctgatttagttgcttttcatccaaactaaaaaacaaatgcttcaaatattgcgaaaaatctgttggcactttttgcttttcttccgcagttaaccacgattccattttgaaggaatgcacctgatattgcatccccgcttcgtctaaatatagctgaccatattcctgcttagtcatacaaaaacaagctcctgctacctccgcaattggtcgattagcaaacggaccaataatattctgtgcgtgcatatggccagaaaagactgcttttacattatatttttgtaataaaccttgcagtgcaagtgcattatcaagaatatatccctgatagattactttattatggcgatacagattatgatgcataaagaatagcacttgttgctgcttttgctgcgcatcaattaattctttttcaatccagttcatttgagattctgaaattcgaccgttagtaatcagatgagtttgtgattcctgcttgccataaatatttgagtcagccaatattagtcgatactgcttattcagattaacgctataagccagtgaatcaggatcttcatgtaaagcataatgataagaatcagcaaagatctctttccaaatagctgggctaatttgcggggtgtaatcttcatgatcacctttaaacttgcgagcccagccgtcaaaaatatcatgatttcctggtaaaactaagaatgcaattttatttttagttaatggcttaaaaatattagctaaacgttctcctgatattttagcgccattaaaggttacatcaccagtaattatcactgcagtgggcttctcttggattactttacgtacaaacgcggtcaaagcaatctcctgataatctaagtctttacctgcactagtgttgcgcatatgctgaaaagcaagaccatcatcatgtaaactatctgcaattagatgtgtatctgataataaccaaagaattggcttctttttactagtaatcacaatttacctttttcaaaaatctattttcactttaactactcatcattataccaacaaaaaaggcatccctgctagggatgcctcattgcgataaaatattgaattaagcgtcgatttcttcgatcttaatgttaactacgaatgcttcaggagtatcagtgcctgaaacgatcttcttagcgtaatcgtcgccttcatgaatttcagcatgtcctaaaacacgaaatgccttatgagtaggaacatcagcgacaacaatagctgctactgaaccattcttcaagtttgcataagcagttgacttagtcttttcaagatattgaatagttgaagcatcaattgccttaagtgaagccttaggaccaacttgtggcacaccgttagcattcacagttgccatgtatggtaagtgtgagttaaaaaattcaatttgttcatcagtaagcttagtagtatctaattttttcataaaattcgacctttcttttcttaagttcattattaattataagatatttgctataaaatagctattattttgccttagcttaattgattcttacatttatcatacacaagatattgtatttaataaaatgtgtttttaattaaatttctcttgctactaatatttttattaagtaaacagtcgttgatatatcaatgcttataaatgctggcaaaaagtcaaggattgaattttattttttagccagtagtatattatcttgcattagttaataagtgatacaagatattgtgcttattaaaataaaaatatattttaaatttcatttttattaatgttatttttagtgaggagaattcgatgacaaagaaaggcttaacaaaatatttatcaattggtgcagtaactactgcagcattatttttagcagcttgttcaaatcaaaagagcactacatctgctaaaaatagtaagacagaaattactatgtggcacgcaatgaatggtgcacaacaaaaaactttgaaacaattgactaataaatttgaaaaagaaaatcctaacatcaaagttaagctagaaaatcaaggtaattaccctcagttacaagggaaaattacttctactcaacaaaatcctaataacttaccaacaatgactcaagcttatcctggttggctttatcaagctgcgcaaaataagatgttggtcaatttgactccatacattaataattcaacttatggttggggctcagtagccaaatctaatattcgtcctgaattaatgaagggtgcgcaaattaatggcgttcaatatggtattcccttcaacaaatctattgaagtcttgacttataacaagaccttacttaagaaatatggtttaaaggtacctaaaacaatggcagaacttaagtctgtttctaaagcaatttatgaaaagtccaaccataaaattgttggtgctggttttgataacttagccaactactatgttctaggtctcaagaatgaaggacaaacttttggtcgttcaatcaagttagattcggctgcctctaagaaaattattaacttctacgcagatggcgtacgcaatggctactttagaactgctggtagtgaacgttacctctccggtcctttttctaatgaaaaagtcgcaatgtacatcggtacttcagctggtgaaagctacactaagatgggtgtaggcaacaagtttacgtacggcgttgctcctcgtcccggtgaatacactatttctcaagggactgatctttatgtctttaaccatgcttcaaaagcacaaaaaaatgctgccatgaaatatatgaagtttttgactagcaaatctagccaattaacttgggctaatgagactggctatattcctgttaacgataatgtcttaaatagtaaggaatacttagacagcaagatgaaattgccaagtgtcttaaaggattcaatgaagcatctctacagtgttcctgtagctaagaattctgactctgcttataatggtatgaatcaaattatggaaaatattttaattgctgcaaataagcatcaaaatgttaatgctcaaattaaggctggtcaacaaaaattagatagcgcttggcgtcaataatgatattaaaaaagcatccctcttctctattttgattagggatgcttttttgcatttgcaagagttgaatttaatttaagcactcacatagagtgcgacgtgcaaagaacctacttttgactggggcaaatgtatttcatccaatcctaaatatttggcttcatcaactattatactatgtcaaaagtatataaagaagagttaacacataaaatacaaaacaaaatcagtgcgaaactccctcatttttatgttcacatagggttcgcactgatttttttcttaactcaaatctttcttagtaactgccaaatgtgccttatcattgataaagacccagattggcaaatctattcctgttgaatcagtcaaattatttacaatttcactgataaaaagctggaccattttcttaggcggttcagtaaagtctcttctttgcggcgtgtaccataaacctgtgattggctttttagtttgtcgatcgaaaatacaattcagggtttcatcatattgatcaaatgaggccttgtagactatatgtaatggatgatgtgccaagttctcgactaactgataacgcatatcgtccgcaatttttcctttactaatcatcattaaactggtaactggaccattttctttttcaaatttttgcaacttgccttgtttgattagcttcttttcaactgaaataaaactatcagaatcaactaacatcgtttttccttctctctactatctattataagcaagctgtcaattactttacataattttaattattatgcaaaaaaagaagccatgacctgaaaatcatgacttctcgcgaattcctcgtccgtaaatcgaaatcttcacgaacatttttaccttaacacaattaattatactagtctaattaattttaattactaaagcttcatatggcttcaatgagatattctctcctagtttgccatcttgtgcagaataattgctcaatacgagttgataattcttattttgatattgttcaggcaatggtgctacatgatcagtaccatagaaattagtgaaaactaatatttttttagcttcatctttcaaaaaacgttcataggcaaaaatttgtggatcatcttttaaaaacattctaatatggccatcagaaatcagttgttcgtgcttacgcaacttgatcaatttttgatagtaagcaaaaatttcaccctcgtgtaattctttttcaacattaattctatcttgatctgttggtaaaagccatggctttgattcactaaagccagcaaatttactatcatcccagtgcatcggcacacgagagttatctcgtgctttagtttttactattgcaaatgcttcatcatcgcttattcccttttgtttcaatgccgcaaaagcatttttagcttcaacatctacataatcatgaattgaagaataatgtggatccatcattcctatttcttcgcccatataaatgtaaggagttccgcgcatacaatgtatcgcagtagcaagcatttcggaagatttctctcgatatttaccagtatcaccaaaacggttaagggcccacggctggtcatgattgttccagaacaaagcattccaaccgccaccttgatccattttttcttgccattcagtaaataagtgctttaatttcatgaaatcaaacggctctttagaccacttttcaccatttttataatcgacttttaaatgatggaaagtaaagaccatggacaattcatgctcactcggcttagagtactcaatcgaattagcaatagtagttgaagacatttcacccaccgtaattgagtcaggatcttgaccaaaagtagagcgattcatttctttcaaatattgatgcactactgctgtatcagtataaagactcttttcctgacttggatcaccagttgaatcaactaacttttcatccttaccggtcacgttaattacgtcaaaacggaaaccatgtactccctttgaacgccagaagttaattactttgaacaattcttgacgaacttctgggttatgccaatcgagatctgcttgagttggatcatataaatgtaggtaataataatccgtatcaccaaattttgcccaagctggtccaccaaacttactttgccaattattaggcaaggagccgtcaggcttagcttttcttaagtaaaagaatttgcggtacttttcgtctcctgccaaagcttttttaaaccatatattttcggttgaacaatggtttagcaccatatccaacatgacgccaacgcctatttcttttagctttttagttaattcctcaaagtcagacattgtgccaaagcgaggatcaattcggtaataatccgcaatgtcataaccgccatcattctgaggggatacaaaaaagggattaaaccagatcatatcaacgttaagcttcttgatgtaatcgattttagcgatgatccctggaatatcacctactccatcgccattagaatcataaaaagatttgggataaatttggtaaattacttttttgcctaaatctgtcatttttatctcctataacttaattttctgtctacgagcaaagtcaataaatttaaactttttaggattatgaaaggataaagttaactgaaacagcgttgtatctgctaaaaaattatgactagctactagtactgcttccttactatccaattgcaatttctcttgtaaatcagcatcgatttcttctaccgtaattgccttagttgcataggatatatctagccctaatttattttctaaataattgtagattgatttttctgcttcttctggcggcagctcagtaattggtggattaaataagaaatcacagtccagcacttctggttcatcgttaatcattcttaaacgttcaacatagatcccagcatgcttcttttgttcagggaagaatttcttgaaaattgccggcaaatcatcaaccatttcatcattaagtagcttagtttttgcattcattcctaatgatttatttaattccgcaaagctagaaattcctgaaataggaaacgaaaacttttccaaattaaggacaatcgaacctttgcccttgattttttggattaatcctaacgaggtcaattgctgcaaagctttacggactgtttcgcgtgacgcgccataaagctctgtcaattgattttcactaggcaagcgctcgccttccttaaattgttgatgtttaatcttagaagctaagtcttgagcgatcagttcagattttgctttagtcatcttgaccttgtcctttcttaaaatcatgttcattatatttttgatgtacgtacatgtcaatagatatatctaaaaactatattgcaggcatgtaatcattttcataaaaatctattgacaacttgtacgtacaggaatattataataaatgaattttgtgaaaacgcttttataggaaaggaagaataacacttatgaataaaaacgaaattgcattacttgctcctgctaatggtcaagtaattgcactaagtaaaacaagtgatcctatctttagcaaaggaactatgggtgatggttttggtttaacaccaactgataatacagttcttgcaccagttagcggcactatctcaatgattgctgaaacaaagcatgcgatcggaattactactaaagatggtctagaagtattggtccacatgggagttgatacggttggacttaaaggtgaaccgtttgatgtagtaattaaaaatggtcaggaagttaaagctggtgaccaaattgccacgatgaatatagagatgattaaagcaaaagatcttgatactacgattatgactttaatcaccaattcatctatgaaacttgatggcttagatgtaactgaaggtaaagcagaagctggcgatacagttgctcgagcttatttaaaggagtcaaaagaagatagttcagacaagaaactttcgtatgatgaattagctactttcattattaagaatgttggtggtaaagataatataaataacctgattcactgtatcacacgtttgcgcttttatttgaaagatgagtctaaagccaatgatgatattttaaaaaatcaacgtggcatacttgacgttatgcatgctggtggtcaatatcaagtcgtaatcggtaatgaggttaccaatgtttacgatgcagttatgaaacaattgcctggtcttagtgacaatccttcaccttaaactaataatcaggatgatggtaaaaatcctgtttctagagcctttagtaatctaattggttttattaccggctcaatgagtcctgtaatcggtgttattgcagcatcgggtatcatcaaaggcttacttgcactactcacccttccacaacttggtgctttacttagcgtcaagagtccggtctatgtcacagttagtgctatggccgactctgctttcttctttctaccagttctagtaggatttgcagccgctaagcggttaggatccgatccaatgattgctgcagtaattggcggtttcttagtttatccacaaatgattacttggggcaagagtatgacgacaatgtttagtcttggatcttggaacttccaattcttaaactattcctactctatctttccaatgattttagctgcttggctagctaaagaatgtgaacagtggttaaagaaagttttgcctagttacttgcaaatgatctttaccccattaattactatccttgtagtttcaactatcacattagttattaccggtccaatcattcaaggagccgcaaatggtatcgcagtctttattaactggctagtatctgcatctggctgggttggcggcttaataatcggtgccttttatcagttattggttatttttggtcttcactggggcgttgtgccactagttgctcaacaaattgcctcaactggtcaaagctcattaaacgcaattatctgcgcaacaatggtttcccaaggtgcagctgttcttgcagtcgcaatcaaatcaaagaaagcagacatgaaagagctaggaattgcagcagctatttcagccttctgcggtgttactgaacccgctatttatgggattaacttaagatataagaaggtctttgcttcaggttgtattggctcagccttcggtggcctagttactggtttaatgcatggtactatgtatggctttaccggtggtctaattggcttctcaagctttttcaacccggcccatcctactcaactaaatagtttctatactttcctaattgccagtgctgtttcaattatagtttcatttattgcagtttgggtatggggatataatgacaacatgactatgggtaaaaaagtagccaagaagcaacgcccaggttcagctaaataaaaatttagagcaaaataaaacgatgaatcacccacaaaggtaaattcatcgttttttgtcttatttaagcagcatcagcaatccgttgtgcctcaattaattcagcttttctgatatcacgaggcaagaactgacgaatatcttcttcattatagcccacctgcatccgatggtcgtctgcaataataggtctctttaataatcctggattctgagtaattaaagcaaccattttagacaatgacaagtcttcattcaacttattctttaattgtttgaaagactgtgaacgagtagataaaatatcctcagttccattttcagttaaagacaacagatgaaggacatcttctttagataattccttaaagacgttcttttccttgaaagaaagatgatatttgttaagccatgctctcgccttacgtgaagatgcactacttgttgacatataaagagtaatcatacaatacgcctctttctaaaaaaactcgttaacttctcgtacattagttctattatataacttactttttgatagtacaagctatttttacaaaaaaattgtagaaaatagtatacttaccttactgaaagaaggaatttgatgaattttaaaacaccaattgccgaacaaatgaggccgcaaacattggcggatatggtaggccaaagtgagttgctgggaccaggaaaggctttaagaaatattatcaagcagcatgttaatatttctttacttctctgggggcctcctggtaccggaaagacaagcttagctcaaattattgctaaagagaatgattatccctttgcttcctttaatgcttcaattgataataaagcacagttgaacaacattattaatgcttataagtatcagaccttcgttcttttaattgatgaaatccaccgtatgaccaaaaatctacaagattttttattaccttatttagaaaatggtcatgttctacttgttggctctaccactgaaaatccaattatgtcgattgtgccagctgtgcggtcacgttgtcaaatctttgagttcaatcctctaacagaagacgatattgcagctgttttgaacaaggcatgtactaaggtccttaaattagtagatcaccaagttgaaaaaaattcgttaaatttgatagcagccgcagctgatggcgacctacgaattgctttaaacattttagagactgttcatgcacttaatcctaaaaagatcaccttagcaaatgttaaatcgtttactaagcagcaattctttagctatgataagaaagccactaaacattacgattatttagctgcatattctgactctatggctggctctgacacagatgctgcactttattatcttgctattttgctaaaaaatggagatttagcttcggttgtacggcgtctgcgtgagattccatatacttatattggcttagctaatccgcaacaagtaactcaaattgttactgcagctaatcaagctgaaaagataggaatgcctaaagctaaatatccactaatgtttgcaacaatgttaatgtgtatttcgccaaaatcaggagcatttgaggaaatttgggaaagacttgatcaagatagtgatcatcccattcggtatcccatgcctaatagtttgcgtgactttcattataaacacgctaaagaaatcacgggagctggcctagctgagtcaccttttcaagctccgcatcaaatcgccaagcaaaattatatgcccaagggactcaaaggcaaacaatattattttccaaaagacaatcaaaatgaacgcagattatatgagcaatacctaaaattacatcgttatatttacggcgaagattatcaaaaataaaggacagcaatgcaattgagcatccctgtcctttttggttagattataaatgaagaaaattggtttattaattgcttctacgagagaagattctcgtccagccacctatatggtagttctatttaagttatttgttaaatgctaatcgaaaaaactttacgtactttttacgtattttattaccaataataacaaaaaagcagcggcgcaaatacagcgtcactgcaatatgtagcaagattatcaatgaagaaaatggtatttatcacttctaaggaggaaggatatttcatctagccacttatatcctaatgctacagtattaatttgttaaataaagcggctattaaatctaccaatatttttctagtggcttttcattcctaccagtgcgagtttgacgcaaatgttcagtcacaatattagtcaacacttcggctaatttatcaatctgctcaacagtcacatattcgtatcggccatgataattgccaccaccattaaataagttaggtgtaggaattcctttaggcgaaataaagtttccatcagttccacctctaaaggattgtacatttggctttagtccagacttgcgataagcatcaagagccagatttacaatatatggcttgtccttaatatagttgtagatattttcatattgttcacgaatatttacagtaaatctattgccatactttttgttcatctttttaactagatcgcgaataaactgttctttacggttatattcactttgatcaaaatcacgaataatcatgctaatgtcagcatgatcaacattgctttgagcatgtagaaccaagaaataaccatcatgattacgtgacttttcaggcacttgatcctgaggtaaattagacaaaaaatcattcatcaaagttgttgcgttaaccatcagaccatatgcttcaccagggtgaactacagtccctttaatatggatcgtaatctctgacgcattaaaggtatcgtattcaaaatctcctggccgcccattgtctaacgtataagcgaattctacattaggaaaatcagctggatcaaaatattgaccaccacagccaatttcttcgtctggaccaaaagcaacaaaaacatcaccgtgttcaatttcaggatgttcagttaaatatttaagcattgctaatgccccagtgattccagccttatcatcaactcctagcaaagtatgaccatcagaagtaattaaggtttgtccttttagatttaataagtctggaaactcggttggatcaagaacaatattatctttctcatctaggataattttctgaccatcataattttcgtgaatttgtggcttaatattaactgcgttaaagtctgcagtatccacgtgagcaaagaagccaataggcgttaccttttctgctgtgtttgcacttaactttccaattgcaaaagctgttttttcattatagtaagcatcaagcccaagctctttcatttcctttactagttccttggccagctcaacttggccaggtgaggaaggaatctgatcatgatgttcataatatgagcgagtattctttttagctaactgaataaaccgtttttcttcataatctaaattataaaaactcatatcatattccttcttacattaattccatcgtatcacttgaaactggctcagacttggggtctgaccaccacgactctttaactgttttgataattttaaaaccatgctttgcatacagcgctttagctgctatatttgcgctaaagacttctagcctaatcggccgtctaatatttggtaacactgaagctagcaattgatcaccaataccacgtcgttgaaattgaggatcaatataaaaataagctaaattatgtggcttatacgcagcaaagccagcaaattcattattaacttctacaatcctaatctcagaatcaaagaaattataccagtatggtgcttccttaaacggaataaaatatttctccactccgcctattttcatttcttgcaaacgagccgcatcatgaacccggcacaaatcttcgtaatctaaactttgaaaacatctagttcttacttgcataatttactcctttaggtgaaagagttaataaatttttatttttctttaattatacagaagtgaattatacatttaaagattttagttccaattcaaccagtcttcatcaaaaaacttaactttttcttcctgtgattctaattcctcttgttgcatcatagctattatcatctcatctttctatttttagaccattagttcgcataaaaattatatcaaacaaaggttcatctttctactcttttttcaaaaaaatattaattgagttagtaatagatgtgaattacctatatttttatccacaatcgcggtaatatcgggcttcagagccatgtttcacgtttattgtttacatttagctgtttttccaagtaatcaaatagcttttcactttataaaaattgtttcataaaaaaggatccaacttaatggatcccttaaacatgttattcgtaaataattacaggttcgccctttttaatattgttccaaacgcttcgaatctcacttggtttaacattaacacaaccatgtgagccaccctttaggtaagcggtcttgctccaatcagtccgccaagaggcatcgtgaaaaccacagccacttaaggtaaatggcatccaatacttaactggagaagcataacttgaaccatcatcattggtcccacgcaatgtacttggtgattccttatagtggatataccacaccccacgcggagtttgatcacccttagaaccttccatagtaccggtaacaacatcacgaagatgaacggctagtttaccctttttgatcaaccatacttcttgctttttcaatgatacaacagcataagtatcaccaatctctttatttgaataaccatagccgtgaggataagtgctgtagcctaaaccgtaaagtgcatctgcaccatcaaaatttttttggcctttggcaaatgcttcgagaagtaagcgttgcgtctttttaacataaacgccccaaccccaagtcttattctttaccgttatggttttgcctttaactttattgccctttggcactgtaaatttatagctcttgtgtaatgttgaaacttctttatcaatttgatttaacttagtcgttaatttactagtatcaccaaattgatagcgattatctcgataagtcacattattcaataaatctttggcctttaattgatagtttttgccattaattttataagtaatctctgctttgcttaagtcagttagtttctttttagctgtagctaaattactagtagtaaacttataagtctgagtcgatggaattttagtttgttgcttcttaaaaaaggcctttgtctcggactcatctaatgattggactgtagtgttatagctataaaccagtttgttattttttaactcaacttgatttttagctttttggttaactttagccattgccttagtaacggttagctttcctactttaactccatcgattgtaacattagggttaaagtgagttttagcatatttttctgctgcagcttgtgttgccacacggtgattatgaatgccaaaacccgcgattactccaacgataattaaaactgcaatcgttaaaataataatattgtttcgtttattctttttctttaggtcttcgttcatactatcctaccttttatgccagtaataatatctttaatatagcaccttgcaaatttcgtgtaaaatctattgatttatctaaccttttttataattagacgactagcatcccgcaaagcaaaatataaaattggtgtacaaattgcagtagaaattgaattgattacagttgcaggcaaactaacaaaggctccaactaacgctactttaaagctcgtccccaccattaaagcttcaacaattgaaacgcaataagtagtgaatatcttagttacccctgcaataatacctaaaataataatatttcttttactatcttgatagtgcattcctcgataaactgctgtcaaaaccgaagccactactactacctcaagcatagttaaccatgatgttgcggcatagccatttaacaaatcaaaaccacctagaccaataattcccgcaatcataccattacgataacctaaatataaaattgctacagcagttagcgtatttccaaaatgaataaatgggcgtcctaccatagcaggaacggggattcttaacacccagatcccaatataaataattgccgcaaaaagtcccgttaaaactaaagcttgtaaagaattcttgttttctctaaatatctgcattattaattattactccatctcttcagtaaatctggtaaagctgctgcataatttggtcctagacgtgaatcttgcttgggtgtttccctgattgcttgtgcaacaaaatcggccgcaattgaacacgctttttctaaattttctttatgcattaaagcagcaaaaaatgcacttgcaaacaaatctcccgtaccaaaataattacctgggagttttttctgaattaaagaccaactatgatcggctgtaattccaacttccgcaattttttccttattaagtgaaataccggtaattatgacattcgagacaccaaattgactagataattcagccgcaaattctgttgctgttttcaatgaattactagttgcctttttgcctaataaaaatgctgcttctgtcatattcggcgttaaaatcgtagccgacttaactagatttcgcatctttattacatagttttcatcaatgccacgataaagttgaccgtgatcacccattactggatcaatcaagatcaatttatttttttgtttaaaatagctaatcttttctgtccaaaaatctaatgctcttttgcccaaatagcctaagtatacagctgaaaaatcaaaaccaaccttttgccaatgggccataatcttagccatttcattattcaaacttaaaaaagtattctcaccaaagccacccgtatgtgtagacaaaattgcagtaggcaatacggtcgggctcaagccacatgctcctaaaacgggtaaagctgcactaagtgatacttgaccagcacaagataaatcttggctaactaatacgccaccattaaccatcttttttactccaatcaaaaaaaccctgctttaagcttaacatgaagtttaaagcatgaaaaattttattttgcgctaaatgtattagccttgatatgattcaaaatttgataaccaatttgtttatttctgttttcatcattttgagtttgatttaagaacataatcaaaccattttgattatctgtagtcatctgaatccagttaccaaagtgagtattatataagttaccatatgctaacttcaagttatcattattcttcatatataaaccacctgaataaccatttgatgaacgtgatgttaaatgagtcatataatcaaagtctgttcgactcaaaatttgcccattggttaaaccaagttgaatacggtaatagtccattggagctgagaacaaattaccagcacctaccaattgagaagcttgagtctttttaacatattgagcccattggtaattcttttgattccaggtatatgagataccatccgtcatcccggctggaatatcttccaagaaataagttcgctttaagccaagcttattaataattcgttcctgcacattttgcttgtagctttgtccagtttcttgacgtataattccagctaacaaaatatagttggtattattgtatgaaaaattaccaggttgattttgcgtagttgagtttagcttattaacaacccaattaattgcatcagcttctgaataaacacgtcctctatttacttcagtatcagctgctgtcaatccagaagtatgcgtcatcaagttgccgacggtaatattatcagcaccttttaaattaggataccacttagagatcttagtatactgtgtaaacttccctgcagaaattaattgagtgataattgcgccggtaattactttttgcaaagaacaaacaggataaactaccttactgtttcccgcacctaatcgcttgccataataaccataaccataagaaatttgttgtggttgtccatcttttactataactacggtaccacgagcataataactagctaatgtatttctaacaaagctccgcatttcagttttgttataacttgctgcctgaactgtcgagctattggcattagcaattgccattccaacaggcattgaagcagctatagttaaccaaatggttgatttgattaatgttttttttaaattaatacgtttcgttttaaattcccccagcaatgttatgtaaattctacccataatattagcatttatttttttcattggggttacaattttgataaagaatcaatgagaacgtatacattttctttttctaatatggataattatttaaatgatcttgatcagtaatctgacgtattactttagccggtacccctagtgccaatgaattatctggaatatctttagtaactaccgatccagctccaataacgcaatttttaccaatttttacgccgggacaaacagtaacattgctggctaaccaacaattatcgccaacagtgatagctgctccatattcaatatcggctatttttccgtctgattgcttgcgagcatttctttgagttggcaacaaaggatgcaatggagtcgcaaatgttacgttaggtccacacattacattatttccaattgttacgggacaagtatccaaaatagtcaaattgaaattagaataaaaattatctcctaagtgtgtaaattggccataatccacttcaattggtccttgtaaatatacattttgaccatgattcggaaaaagacgatcgataattgctttccgttctacctcatcttcatcagtagtcatgttgtaatcacgtgataagcgatgagctaaactggaaatctttttcagttcttcagtatctgggcgatatggtttacctgccaacatttttttagtattttcttccatcgataaagcctactttctaatttaatcgcttacttaaataaatcatgtctactagctgatgtccagcttcaaaaatcggatgatcataattttttacaaaaaaatctttgatcttacctgagcgtttaaaaccacatttttcataaaaaggaatagttaaggggctatcacccgttccaacttgcaaaatttgatatttattttgatacttcttagcaataaaattaatcaaatgtttagcataccctttaccttgatcttctggataagtggctatattttttatttctactgtattaccattttcaaccgtaataacacattcagatctaacttttcctttatcaatcaagatatacataattccacgttctaaatagcgatcaatcatactctcttgttcatcagctaacaaaagtaagtctatatactgcttcttattagattttatctctttaatttccatgattattttccaattaatttaaaattttcgtaaattgcaataataacttgaacacttttgtttaggctgtttgatagatgcgatctaattctctttcaaagatctcatctggtgtatgataagccaagatctttcttggcaatgaattgcaccaagtttcaatattaatgatttgttggagagagtagttatgaatatagtcacctttaggaatgaatctgcgaataaggccattatgcctctctacagtgcctttatcacaagaagtatatggatgagcataataaactagtgatttggaaatatcttccagctgagatagatccgcaaattcagaaccattatcagtcgtaatagttttaaagatatcgttccaatgctcgctgtattgcttgcgcagacttttaaaggcattcattacactggcagctgttttatctgggattttaataattaggaactcacggctcatgcgttcagacaaagttagcagcacttcgtcgtccttggtcttatggcctaaaacaagatcacattcccaatgcccaaacacatcacgcttattaacttcctgtggtcgttgttcaatactgcggcctagcttcttcttatttttacgaatgcgatgaattttggtattgcgcttgagtttctctggcaaatcatagttatggatgtttaacaagccttgatcgacataattataaagcgtcctagtgcagacaatatcgttgctggtaaattcccctacagcagtgcagcgattactgcaggcgtcgagcgaccagccatcttcaaaaaagtgctgttggacgtaatcaataaacttatgcttcttaagaaaatccgatttgcgtccacagtatcgacgattgttttgataaacactctgaccttgttgggctttataacgtttaactttaccgtgatacagcttaacagcccctcgtttgatctcatagtgaattgtactaggggaacagccaatttctcgagcgatggaacgcaaagaacaatgatctttcaaacgagtttgaataataacccgctcttcaagcgatagatgtgttccttttttacgcttgtccatgatagaatgtagtgagtccattttgacctccatagatgtttttgtggttattaacattctatcaaacaggtccaaatggacttttttattttgtatcaagtgttcaatttaattttacaatcggcaaatttaaaatttttctctttctactcatattctatgataaactcattattgttataaaaataagtataaacgaggaaaaaatgcgcaaaaaaaatatttattctatttgtatcggattaccgatctttttgattcttgcattctctattatggctcatgcaagttgggttaccggctttgacaatttctttgaaggcttagtccacagtattcctaatctgcagagcattatgcatgtaattacatttttagcagatactaaagttgacttagtttggatgctgttgatagctgtcattctttggctgaaaaagcagcgtcctctttcggcaagtattgtcatttcactagttacagctgatgcttttggttggattgttaaacatataatccaacgggcacgaccaactgctcacttagctgctgatgatggcttcagttttcctagtggccacacattaggaatggcgattattgttttctggctaatactaatattgattccagctttagttaaaaataaaactgctaaaatctggctcactgttttattagctatttggcttgttttagtaatgatttcaagagtttatctctacgctcactggccaagtgatgtttgcggctcagttgctatgggcttaatgtggattggcttagtagatgcaatttgggataaagttactccacaaacagacaaaaataatttttaagattaaaaatagtcgacgataagtcggctatttattttgggcaaaaagaaaaagtcactaaggaaaatgtccttaatggcttttctacaccttcaaatttcttcctatcagcagatgtcataagaaacatcttgcttagccttttcatcctcggagcgctcatcacacgctccgctactatgatatcaaataaaaataaaaagataaagatttttacttgataaatttcaaaaaaagtatatgaattattaaaaatcaaatttgtatattgctatcatttttaaccttttttagctccgatttaactgatttgcttttagcattgttaattgtcttaaaaaaggcggaaatttggccaatttctttttcggtagtcgaacaacagccacctattattctagcaccatgttcataccactcttggcttaactttttaaaatcgaattttgcattaaatggaatccaattgcgctcaaattcgttataaacgccacccaagttaggataaatgacaatttgtttatcagtaaaatcatgaattttatcaattactgcagttgctaaaaacggtttaaagcaattggctccaatcgcaaatacttgatcatattcattaagcttttgcactacccgctttaaaggagtgccatcactaattttagttgtatcatgcaatgtaaaacttacatacactggaatttccggagcattttcctttaaccaatctaagattgctacaacttcatccaatttaggctgagtttcaagtgcgagacaatcaggtttatttgccaataaaatcttcaatcgtggtaaatgaaaattaagatattcctccgttgttagagaataatctccgcgaaattcatccccttgagctaaatatgcaccataaggtcctactgaagccgctacataattatgaattcccgttgtctttgcaaaatcatcacgggcttttttggcaatttgaactgcattagtaatcaatttagtagcctggtcttgtgtaaaaccatgtttttcaaaagctgggatatttgcttgataagtatcagtaattgccatctgggctccagccttaaaataattcatatgtacttgataaatttgagcaagattatgttctaatgcaattgctgtccaaagttcattatttgtatcaatgcctaacttctcaagagctgtagacattgcaccatctaagattaatcctcgatcacggatctgtttgagcaaattcatttttctcaccttagtataaattgagtagatagttaatatatatttaatattgcattaatcttagatctgtttcaaatattatttcttcctatgtcttattttttagctacagtttgctataaatttatttaatgctattttcatataatattaaaatagatttttgaaatcatgtaaataattggccaaatagtgtgccgttaaactttcaggcttttgctttaattctaaaggcttaccctcttggacaatccgaccaccgtttttaccaccatgtgggcctaaatcaatcatgtaatcacaattgacaattaaatttaaatcatgagtgattgtaataatggtagctccctgatctaacaacttttgcattacttggaccagaaccttcacgtcaagaggatgcaagccaatcgtaggttcatcgaaaacaaacaatgcatcattttgtttatgactaagatgagtaacaagtttaaggcgctgagcttctccacctgacaaagttggtgtatcttctcccaaatgtaagtaatccaagcctacttcttttaacaattttagctctcgttcaatcttaggcactttaacaaaaatcggtagagcctcattaacatctagatttaggacatcaacaattgacagatcatgccacttcaccttttgtacatcttgattataacgatcgccatgacaggttgaacagacttgttgcatatctggtaaaaattggatgtcaagagtcacaattcctgtaccaccacaagtaggacaagctccttgtttattattatatgaaaaccaacttgatgtataatgcttctttttagcgagtggctgactagcatataactttcgtaaattgtccataattgaagtataagttgctacagttgaccgagtacttttaccaattggagatgcatcaacacttactacatttgaaattgggctagaaaatctactaatttgttttggcaatttttcactttggctttttgctataatagcgggtactaaactatccagaatcaaactagttttaccggcacctgaaaaaccagttactgcagttaattggtttagtgggattttagtttttacatcatgtaaattaaaatattgctttacttcaaataaaatagaatcggaatttattcgagtggctggctctctggcaagtagtttagcactaccatccaaatatggtcgaattaaagaatgttgatcatgtttgattgcagtaattgaaccttgatccaaaatctgaccaccttttttacctgaacctggaccaatctcaattacctcatcagcggctttaataatgtcaacattatgatcaacaactactaatgaattgccctgagcaactaactttcgtaaaaccttaattaatcctgcaacattagcaggatggagaccaatagaaggctcatccaaaacatataaaattccagtagtttcagtacgtaatgttcttgctaattgaattcgttgcaattcacctgtcgataaggtatttccacttctagccatagtcaaatagtctagccccaagtctaataatggttgcaaattatccaaaaactcctgaataatcgaatgagccattttatgcatattagttggtaaagttgcttgcacatctttaacccaggtaactaaatcacctaactgcatttcggccacctgattaatattttgcttaccgaccagctgttgtaacaattctggtttcaaacgactaccatgacaaagtggacaagtcgaataagtaaagaattcggctattcttttttgcgcacgttccgatttgctactctttgctgaacgatagacagcttgccgagcattttcatataaggcattaaaatcatgaaataccctgccagttcctgataaaaagtccattttatatttcttttcaggaccatttaagacaaaatctttttctttatcagtaagatctttataaggaatgtcgatcctaacaccagcatgttctgcaacgttaggcataaagttccgtcctggcaagctccaagatgcaactgcaccatctttaattgacaaattttcatccgtaatcagtttagattcatctagttgccgtatcttaccagttccgccacactcagtacatgcaccatctgaattaaaagcaaattgttcggcacttggtgcataaaattttacaccacagactggacaagttaattgtcccatttgctcacctgacatactcattgcctttgcaattgccaaacttggcttcaaatggtgtccattaggacaaactggagaacccaaacgagagaaaattaagcgtaaaacattaaaagtctcactcaaggttcctactgtagctcgctcatttggtacacttggacgctgccgtaaagctaatgcggagggaatatgtttgacgctagttacatcaacctgatttccctgtttaattcgcctacgcatataagttgacagagcatcaagatagcgtcttgaaccttcttcataaagaatccccattgctagtgatgattttcctgagcccgacagtcctgaaattgctacaaatttattcaaaggaatgtcaacgtcaatattctttaagttatgtactcgtccgccacgaacttcaattttcgttggaatcgtcattaaatatcccctttccattatttagtcattatctcttttaatctataatcatgaattaccaacaagcaaaccaatttttggaaaattatgacaaaattactattaaaaatatgtgttatatgatatattataagtagataaagtaagcgcttacttttgaaagacatagaaatgaggtgttgttgtgatattgattaaagaaaccgttgttttttcttttgatagatataaaaataccacatatttagagacacccatcaagctaggagtcatgcgtaacggcgcttgattcgtgtcctaaataaaaatgagggttacattttgtaactcttatttttgttcttaaaatacaaaagaaaatcagtacaaaacacggagtttgtactgatttttaatattctaaaggttaattatttaacccaatcgcggacttcactatcatcacgtgcaacaccaacaacattcagaccattagcccattctttaaagtgactgacataagccttatggttagtgcctgctgaggtaaagaatgatgcaacttcaccacggtagtttttcatcttttcaagtaatggcttaattggagttgcaggatagcctgaccaaacagggctaccgactaaaatcaaatcataattattaaaatcgatatcatccatttgaatttcaggataaggaaccttaccttgaatttgatctagagcaatatcgttggtcttgtacatatctgaatcaaaagcgtcaggagcaacagttacttcctttaattcgctgttttcaatttctccgttaatctttttagccatgttcttggtattgccttcccaagaataatagataattaatgtttttttagccataaatttagtccttctttcatttacatttattgtaataaaaaaagaccggtttgaccaatattttaatacgcgtggtgctagttaaatcgttttagttaataactgaaaattgaaagcaccaaaatcaagctcaagtcctgtcactattgagctttcttagacgtaattagtttttatatgatctgtttcagtgcaatttgtatgaatcgtggcagttggttaataaagtcattgattacttcatctatcttttcaaaactattctgtttaagctcttttaattctgaaattaagtagaccaatgcatctacgaatctaatatcaggtaaggattcgttcattagatagaataaatctccgattgtcttatcatctgtattttgtctttcctgccaggtcaatagatcataagttattgctgtaactgcgatatagccacattggccatcatagctttgaacttgagatttatctaaagcaagatattgcttagacgtcttaaaatatgtttcaatttgccatctacgaccataaagttggatgatttcttcagggctaagctttgtctgagtagtagctaaaaccaaatacttgttcttgtttccacggttggagacaaagacgagctttaataaaaagctatgtccatgatattgagcctcaactatgcttgaataaagataatgtttctttttacggatgtttgaagcagccaaacgatcatacaagtctttaacgctatagcggcgatggcgataaatgtaataaatctttgaactcttcttgatcatgccaagtccatctaaaccgatcttctttaaaatccaaaacattcttggagaagaaaaccaagaatcgaataagacgtatttagcttctactcctaatcgtaaggcttgtctaatcaactctacagttacatcattcatctttctctgagcttgatttctccttttaccagaaattgaacgttcatcagcagtaatgggagcagctccaatcatatttttcttggttttggttgacatcaaggcaaagttaaccggcaagaaggtattgccatcgctccagcctaaagttaaaccacgatatccgttcaaatactcatgcttgtcatggtcatagactttagctagcaattcggtctttttagaaaaagaccgagccatcagcgtatcgtcaacgataaaagcaagtcggcgtcttttatcgataaatggttttaagcagccaatgagccgggctgcaatcaagcataatagtttttgccagttgattcttccatcgttaagtacattgcgagcagttctaacggaaaaacgtttgtcatccttagctctgaataaagaaagccgagcaaaatgtactgacatcagccaagagataatcatggttaatgaaacggtggatttacgcttaaaattgacttgtttagttaacttagctagaccaattagattaataaatgaagaaattaaggatttagtatcattttctgtgtcgatttgttctatactgttcattgcgcaggatctcctttactttttaggtcgacacttaaagtataacgcagagagatcctgcgtttttatttttgataagaaaaagccaagaggcgcggggaaggagcgttaatcttagctttcaagttttagttaataaaaaagtccaatcttgttagactcaacttgtataataatagaaaagagcctgatctgattgaactgccttaagcttaagcgttttagccaccatttacaagttagttttaaagatttagtgataatttgtcggcactggtatcgtttgtatgcaccggctgagtttactcatcggcgaaatattgatcaaattaaaactacggacagtctgattttggctttacttatctggcaagctaagacaggaattgaatcacaaagaagattctgtgaatgtttcaattgtttatcacactcacgttttaatcggcgttcacgtcagctattgcaattgatttatcagatacggcaagaaatgaataaaaaggttgacctgaatggacatttcttgatcattgacagctttccggtacctgtttgccaaccaattcgcaactatcgtgctaaaatttttcgcggttatgccaacattggttataaggccaccaagaaaatttacttctatggtttcaaagttcatgccattgttagcgatgacggttccattcttgattatgtcgtaacaaaagcatcagttcatgatgccaaggagacagttgaactgctggaaaatgcccatccatctaattactatcttcttggcgacgaaggctatttaggcaaagaactgcatcaacagctaaaacaaatgggttatgaactttggacaccatatcgtaaaaatatgacaggagctaaaaagcacaatgatcatcaattgatggctattcgcagaacaattgaaagcgacttttcgcttctgatctattacaatgccgagaacaatcgagcacgtagtctgataggctttcaaagccggttggaaattgcaattttagcttataatttggcttattgtctagaacgatttaactagcaccacgcgtattttaatattattattttagctattttccttttcttttgattatttccatcatagcctgaccatactttttcatcttcgcttgccctacaccacttacctctaaaaattcactttcattttgtggtttaatttgtgccatatcgtgcaaagagcgatctgaaaaaatcataaatgctggtactttttgctgcttagctaattccaaacgcttttgtcttaaagcttcaaataaagtatcactttcttcaccagcatgagtagtagttactgaaatcttagcaattcgccgtttgactacagttttgccatctagtacatcccacccatgattagttacatgcactagtggatatttgctaccttcaacttctagataacctgaagcaattaaatagtcaatcaagcttatagcatctttttgcttcattcttagagagccaaaagacttatattgtgtagcattcatttcttgcatgcgatgattttttgagccaatcaaacattgagcaactatcgtttttccaaagcgaccatctagttcataaaccatactaatcactttttgagcatcaatggtaatgtcagtcaatttatcctgatttagacaatttgaacatttaccacatggcggacaatcttgaccaaaataacggacgataaattgctgcaaacattcaccagtattagcataatcagtaattgtttgcaacttacgatattgcagttctcgatatttatcatccgcatctgattcatcaataaagtagcgatattgacgcaagtcaccaggatgatagattaaaatcgctttgctttcttccccatcacggcctgcccgacctgcttcttgatagtaactttccatattacgggcacttgaggcatgaatcacaaatctgacattacttttatcgatccccattccaaaagcattagttgctacaattacttgaaattcatcaaattgaaaagcttcttgtacttgacttcgttctgaagaatccattccaccatgataagcaccaacagagattcctttcttagccaaataatctgtcaaactttcaacttttttacgtgtattagtgtaaataatccccgctttatcctgatgtgccttaatatattctgaaatatataatggagtattttgtggtgagttgaccactttaaacgatatattagggcgagcaaaagaggtaacaatcatattctccttgggaatattcaattgttcacaaatatcatcttgaaccgcaggcgtggctgtcgctgttaaagctaatatatttggtctgctttttagtgaattgattccatctaataattgacgataagcaggtcgaaaatcatgtccccattgtgaaatacagtgtgcttcatcgacagcaactagatcaatatctaaaaaatttaactgatatctaaaataatcaatcgctaaacgctcaggtgtaatataaattaacttaattttgccttcatatgcctgacgtaaaattggattaacctcttcttgcggtgtagtagaatttaatgctgccgcattaattccattttgctttaaattatcaatttgatctttcattaaagaaattaatggtgaaataaccaaagttacaccggaattaatcaaagctggtatttgataacacattgattttccgccaccggttggcataaccgctaacacattttgcttttttaaaactaaatcaattacttgtttttgacctgggcgaaaatttgtatagccaaatgtatcttttaaaacttcttctggattcataaacttatcctaactagttaaattgctactttttattctaaattaacaattcaccccaaacaagataaaaagattcacacttttaaataaagaaaaatgtgaatcttttagagttaaatttacttataaaatgtttcttctactgcatgagtaatcgcaatcttatcatgagcataggacaaaccgccctgaatataaagcatgtatggttcacgtaaagggccatcagaagaaagctcaattgttgatccttcaacgaaacttcccgaagccataacaacttcatcttcgtaaccatcctgatgatatggaattgggtcaacaaatgaattcattggtgaatagtgttgaatagccgcacagaattttaccatcggatcaggtttaccaaaagtgacagtttgaacaatatcactacgtggatcactccatttaggtgaaacctgcatccccatttcttctaataaggctgcagtaaagaccatacctttttgagcttcaccagtagtatgagctgccataaagaatccttggtagatatcgcgcaaataaccccaagttgcgccttcaccttttccagctcctggcactgtcaaccgtgaaccagcaccatcaattaaatcctgccggccaactaaaaaagcaccgccttttactaaacctgcaccagcattcttataaagggaaccagccatcatatcagcaccataaaaagttggttcttcacattcagagaattctccataacaattatcaataaaaatattaacatctggacgaacttctttaatgaacttaagcattggcttaatcttagccatagtaaaagtcttacgagttgcataacctaatgatctttgaattgccactactttaattgaaggatccatgatatcttttttagcttggtcgtagtctacttccccattcttcaattcagtagtcttaaaattaattccccattccttcatgttaccgggcttattaccagcaagaccaattacttcttgaatggtatcatatggcgttccagttaaataataaagggtatcccctgggcgaagcatgctgaaaagaccaactgtaattgcatgagtacctgagccaaattgtggacgaactagagcatcatctgttttaaaataatcggcataaatatcctcaattttatcacgacctatatcgtcataaccatagcctgttgatggaactagatcttcttcaccaacatgatgttttctaaataggtccaatacacgttgttgattatacaaaacctgttcatcaattttttctaaacgaggttggatcattttttcaactttagtcactttatcgtttaactcttttggtaaattctctttccaagaaaaactcatttttaactccctatttatttttgattacttctgcttgtacgcataaactaccattattattttcgctcagatatactccctgaatctctggcacaaaaccaggaaacttttcaatagcatgcgccaagacttcaaagtacttttgatctaccgttccccacttttcaccgggtgcaacaatgaaaacacctggaggatatggcaaagctccttcggcagcaattcttccaacaacattttctaggttgaccagttcattttgatcttttttaaaaagctgatcagctgtagctggtgtcatttgatagtcttgcatccctgatttagaaaatagcttttgctgtaatacaaaagtattattttcctgatagtactcatgcatctcttgacacaactgtttcagggtatagccttgataacgctttggatactcattatataaaaccggcaaaacatctttcattaagtcatcttctagatagtgtttttcaaaacttaaaaaagcttcaagtaaagtatctagttctgcttgactatctcccggtgtaagtaaaaacaacaatgaattcaaatcatttttagctcgaataatatgattttccattaagtattctgccactaccgcgcctggaatacctgttttctcatattttgcatttttaacatcaatcccgggagtttttaccgtaatcttcaatgggtcaatcattgcttcgcctggaaccattttacggaaaccgtgccaatccgtattttgtcccatttcccaatattctgcattggtagccaattcatcagtcgaaatttcggcaaaattgtcaggaactaatggcttaaatagcttagactttttgagtagttttttccgccattcaattcccattcgcagagtttgatcccaccactttttatttcctgctccagcagtaacgtaggaattaactgttaatgaagcataaagtgggtatgcataactggaagtaacaaacttcagataagcatgattaaagtgcttatgatcaacatatcgtttttgtcctttaatatgagcatccttttttagaatctgtgacgcttgagccatacctgcttgctgtttatgtaatgactgagtaaccaaaatacctggatcatcaggacccaagttaagtagaagtggtgataaatgtctcataattggcacgaattcttcaaagccgccccaggcacagtcaaacagaacataatcacaaagtttaccgattcggtcaataatccactgtgcatcataaaagactccatcataggtttctgcttgtacgattgttaacctaaatggacgcttagcctttgcctttgccggatctatcttagctacttcagctctaattttatcttcagttaagaaggctggatccatttctccaattagtccaagtgcatttcgatcagttggaatgtagaccggctttgctccgctcattaccaaggcagaattatacaaagatttatgattatttcgatcaaataaaactagatcgccttcagataaaagtgcacttgcgcaaatagaattagctgaagtcgttccgttggtacagaagtaaaccttatctgcatgataagttttagcagctttcttttctgcattaagtggcgttccagcatgcgtcattgtatcccctaattgaggaacagtatcacttgtatcggcaaacattagatttttaccaaagaacttattaaaaactactccggcaggatgtttgtcataatattgcccattatggtgacccggtgtagtaaatgaaattggttttgcttgagcaaaattgatcaagtcggtcaaaaagcctggcaccatttgcttttcatattctgtagctttctgagtgacttggtcttcatctacctgatcagttactttaatcaatggaatcggaaagccagattgttctcttagagcttctgcttgttttattcctaatgcatcatcatttttgacaacaattgcggcaagttcagcactattttgtacatcgccaattggaattgacgaccaacctttcatcttattaacattgacgccatttccaatggcaattttcaaaaaatccatcctttttctttccattttgtccacgaaaccgttttacatattgcaaaactttaaaaagtctttataatttttctacagtatagcgtactttttgcattctttcttaaaatacgctacagctgaaattattatataaatattggaggtttttaacaagtgcatttgccttgctcgcctccgagaacagctatgtcaacacaacaataaaatagcttaacttggaggaatttttatgtcagaaacaatcgaaacagtcaatttcgaacccggcaaaaaacactacatgtcatggccggttattgcattgatcgacttcgtaacgattatcagttttgaaaatattttttatccatttcaaaatcaaggcttatcagtagttgtatcttggattttcctactcttcgcctacgttattccttatgcattgatgtctagtcaaatgggcctaacctttactgatcaagccggtggattggcatcttgggtacgtcattcatctaacgatacactgggctactggacttcatggatgtattgggttcaaactgttccttatttggtcgatgtttctaattcagttattgtgtccttttcatggattattttgggcaacaatactttagacaagcatatgtctactttttggtttgggattttgacctttgtcattattcttgcctttattttggttgaaaatgcaatcaagaattcacttgaactactatctttaattggtggtggtgcaatgtttattatgtctatgctctttgttttacttgctgtttggtcagttatgcatggacaccatattgctacccaaccatttaacttggccgcatttaagccatcatttagtttacgttacttttctaccactggtcttctaatcttcgccatgtctggtgcagaacttgctgctccttatatcgtacaaatgcgcgatccaaaacacgaatttcctaaagcaatgtggatgttggctttgatgactggattcttgactatcttcggtactttggctttagcaatgtttttcaatgctcatcatattccacatgatttcaagatgaacggaccttactatgcatttcaactactaggcgaaagccttggttggggcaaagtattaatgtacatctttgctgttgttcaagccctctttatgatggcccaattagcagttttacttgatgcatcaagtcgtgtctttgccggtgacgttgccgacaaattcatgccaaaatggttaactgggaaaaaagacaaaacaggtcgtccagttcactcgtacactttaacttgtggtttagccttattcttgcttttacttactgggactttgccaaatattaattcaatttacaattggcttttaaatatcaatggtattatttccccatacaagacttgttgggtattcttcgctttcattatgttacggatgcaccaagagaagttccactcagattatgtcttcattaaaaataagactggtgcccttatcatgggctggtggtgcttaatctttacctttatctgtgctactttaggatttattcctcaagaagcagaagcaacattcggtagcgcagcctttaatcaccaattaattatgaatattattacagttatcgtactctttggcttaggcttcttactaccatacttaagaaaacgcgaagaacgtaaagaaatgaatatataaaataaacatgcttcgatcagttcgaaaatcgaggcatgtttattttattattctaagatttcaacctgcatcttactaggaacattaacaaagtcgaattgtttttgaaaaacatgatcaaaccgtaaatcataaacagaaccaataattggtgttaatgcaaaagctcgtaaagtgttcatatctttagttttattagcataaatatgatgcattggtggtttgattttataaattcgttctaaatattgtggacttacctcatcaacatagccttctagagtgaaaccaatgctagtgagagtttctcttccgcgcaaagcggtaattgaaactttattgtgtcccttaatatggcgataaaatgacttctgattagtcgttgcaaaaatcagacgaccatcttcattaaagtcaatatcgataatattggtatgtggatcaccattttgatcaacggtaccaaaaattactgaatggaaacaatcaacgattagatctaggaattcgtcgttacttaaattgcgatcgagttcaggaacatgttgtctcataataatctttccgtttctatatactttctgtaatttttatctatattatttcttatagtgtacatgacacgattaactaaaaacaactttaatgctcattattttcccattttaaatgtataattgtttaatattaatttttctggtaaaatttcagctaacaaaaaataagaaaagaggcagaatatgaatttagactataagaaattggcccaagccaaaaaggacgacattcttcgtgatcttgacgaattaatcgcaatcgactcatctgaggatttgaataatacttccgaagagtatcctgttggtccaggtccagttaaagcaatgaagaaattcttatcgtttgcacagcgtgatggtttccatatcaaaaatgttgacaagtacgctggccgtgtcgactatggtactggtgaaaaacgtttaggcattattggccacatggacgtggttccagctggtgacggctgggtaactgatccttttaaaatgttaattaaggatggtaaaatcattggtcgaggttctgccgatgataaaggtcctgccctagctgcatattatggcatgcttttacttaaagaagctggatttgaacctaagaaaaagattgattttattgtgggaaccaatgaggaaactaattgggttggcattgattactacctaaaacatgagccaacccctgatcaagtattctcacctgatgccgaatttccaattatcaacggtgaacaagggatctataccctgaccatgacctttaaagatgacaataaaaagggatcagtaatccttaagtcattcaaggccggcattgccgaaaacgtaactcctcaaaaggcctatgcaactattgttggtagtgatttagccacaatgaaggaaaaatatactaagtttttatcagataataaacttgaaggcgaattcactattgagggcgatgaagctaagattgaattaactggtcaaggtgcccatgcatctgcacctcaagttggtagaaatgcggctacatttttggcagtatttctagatcaatttgattttgctggtcgcgataaaagctggcttcatttcttagccgatgttgaacatgaagactttaacggcaaaaaattaggcgttgctcatcatgatgacttgatgggtgatctctcaagtgctccatcaatgtttgactacgaggaaaatggaaatgctgttttgaaagataatattcgctatcctcaaggtactgatccagataagatggttaatcaagttgaagaaaaatttggtgatatcttaattccaagttttgcttcatttgaagaacctcattatgtacctggagacgatccattagttcaaaccttgctcaaagtttatgaacgccagactggtaataaaggtcatgaagtcgtgatcggcggtgggacttatgggcgtttatttaagcatggagttgcatatggcgctcaacctgaagatgctccaatggttatgcaccaagcaaatgaatatatgaaggtagatgacctaattaattcaattgcgatttatgccgaagctatctatgaattgactaaggacgccgaataaaaatttttacatgtatcaaaaaagcttatatactgatcttgttttaatgcagtatataagctatagaaagttgctagtgtcatatatcactagtgacttttttatttttccaataaaacttcttcattatttttcttagattttagccaaaaatgatgtcccaagtaacaaatagctacaaaaggaattgtatagtacaatgctactctttgggttggatcgaaccagattaatacacaagaaagcaggcttgatataaatgcaaaatatggaattacaggataccatggggtcttgtacttcaattcactgagttgatgacctgagtttaaaaatgcccttctaaacttcaattctgaccatgcaatcgccgtccaaacgaatacaacagctaatccagaaatagaaactaatactagataaaccgtcgaggcagcaactttactagaaatcaaagcaaaaattccgtctaacatacttactactaatgacaatactggaataccacgcttattagttttggtgaatgctttaggaattgttccttcgttgcccaacgaccaaagcattttagttgaagcatacaaacctgaattggccgcagaaataattgcagtcaaaactacgaagttcataatatttgcagcaaatggcacatgaattaggtcaagcacatacacaaatgggctttgagttactccagccgtatgataaggaattaatgcggccataactacaattgagccaataaagaagataattaaacgccaaagtgttgtcctgattgcttcaggaatagctttctgaggattctctgcttcaccagccgtaatgccaataagctcagttcctgaaaaagcaaagtttactgttagcattgttgtaaatactccaccccagccgttggggaaccagccatttttataaaaattaaccaatcccaatgtgcttgataaactttgctcaactgatcaatcaaagctgttgcggtccataatttattattagtatctacgccttgtttttccaattcatacgacattgcaccatctaggactaatcccctatttttaatctgttcaagcaaacccatttttttcatgctgtcaacattattttagtaaatttcctaaataatagccgcaataaactagaaccaagccacccagatatgatgacaccgcgtagaatacaagaccacgataatttttactcttataaagctcaactaattctgtattcatagtggaaaaggttgtatagccacccattactccagttcctagtaatgcataaataaaagtgttagcaccaattccaaaaatcaagcctaaaattagtactccagttaagttaataaacaaagtcggtgtaggtaaattagaaaatttattaccaatccattcccaatgctttttaccataattagtaatagcataacgaagcatagctccaattgatgcaccaattcctgcaagcaaaaaattcatcgtgtattcctttcctttcttactaattgaccaacttttttaccaattttcattcctaacatagcaaaaaaaaagccaaaaataattgagctaaagtaataaattactgcttcgattggcaaattagcctgcatattttttaaaacatcaagattaaaagttgaaaaagtagtaaatgcacctacaaagccagtacctaatccaactacaagccactgcctaatctctttagtttcaataaaaaagtaggtgaaaaacgctaataaaaagcaacctatgacattaccccaaaaagtaccataatagctgaagtttgcatttaaaccagcacgtgccataccaccaaaaaaggcgaaaatagcgatactaatgtaattaataaattttgaattcaaacagattcctcccacaaaaaaacgtctactttacccctatcggataaagtagacgtcattagattttactcggttaatggcgaacgtcatcgcctattcagttgacagttatcatcatacgacttttctgtttggttggcaagttgtattgtgtgcgtgtcgcaaagcgacacgcagtttgattatttaataaaaaaatttagtaacaacgtgcttgaaataatgtataattatttttaacgaatgtttgaaaggagcctcaatcttgacttttccatatgaagataaatttcgcatttactgtaaacaacaaaagaaactagccgattcaactatttctctagcctgttcttcaatttcaactttttgggattattattctggtagtttagatgctactgaagcaaatgtagaaaatgttacaactggagatatacgtaactttttagattcacttgaaaataaactccatatgaaaagtaatacagtaaataaatatcttagtcacataaagatgtattttgtttttttgaatgaatatggctacatcattacttatccattgctcactttacgtggtaatcgcttcaatcgtaagcaacactatgttattggctgggaaaatcatttatcagaattaattcaaataaaaaatattcatcctgaaactatcaagatgatggctgctattgcttgtggttttaagccaaaagaaattatgattttgcatgtaaatgaattgttggtaaaagttaaagaaaatgatgtcagagaatatatccaaaatcacactaattttgccaataacgataatccctatctgtttgctcgccgcgatggcaaacattacgcttctgattttaatattaacccaaaaattgcccctgaccgttcaatagtcggcatgccattaactacacataagcttcggatgtcttatgtctactctgttttgtctaattcaaaattaagagaagcggattatattgaaaaattacatctttcaatgaaaactttaaattactatcgtaaaaatatgacactctatgtagaaaccagtaaatttgaattaaaaaaataaacaagcaaaaacgactacccattttgatatagtcctactttagtagacagtacaaatatataaaattgtactatctatgaaagcaggactttttgtatgtctagaaaaagtaaatttagctatgaagctaagcttaaagcagttaaacaatacataagtggcgaagcatcacctgcttcaattgcgaaagttttaggggctggcaagactacactgcgccaatgggtatatgcatttaaagatcatgggccagaagcattaagaccacataaatataatcaaagatacagtaaagattttaaactcaaatgcatagctgcctatttaaatggcgaaggctcatatgattatctaacaaataagtttggtttgcgaagtgctgcacagttaaagcagtgggttatcaagtataatagtcatcaagaactcaaggactacaatcctattctggaggcttatatgactaagagaaaaaagacaaccctagaagaacgtaaacagatagtgaaatactgcaaggatcatcaatggaactacaaggaagcagctcttaaatttggctgcagctatgcccaagtatacaactggtcaaaaaaatacagcgcaaagggaactgacggcttagcagataggcgcggtcatcgtttaaaagaagctgagctatctgaaactcaaaggctaaagcgtgaaattgaacagcttaaaaaagaaaatgatattaaagaccaagagatagccttcctaaaaaaagtgaaggaattagaaaggatgtgtttgctggacagccaaaacaaagacaaatagcacttaaacaacagcagcgaaattctctttacagtttgatcaaagaatgtcaccgagaatataagtggtcaattgaatggatgtgcaaacaagccaatattgcccggtcagcctactacaaatggcttaatcataagccaagcaaacgtgaactaagagatcaaaagattcttaagcgtattaaagaaatagctgagagcaataacagcctctttggttctcctaagatgactttggctttaaacaatgagctagcagacggtgaggccaaaatataccgtagaactgtggctcgcttgatgtgcgtgaatggcatctatactagcaaggccagatttaataagaggtatcgctatcaagctgctagaccggaagaaactgccgaaaatctattgcatagagacttcaatgccactaaacccaatgaaaaatggtgcactgacattactgaagaaaaaattcctggaacaagtcaaaagatttatctctgtactatctttgatctatatgatcgtttccctgttggctatgctttaagcaagcgcaatgatacagccctagttaacgctgctctgtcaactgcttggaaaagagagcccaatagtcatgcaatgcttcatagtgatcgaggatttcaatttaccaggatgccttttaagcatgagctagaagaacatggcatgccacaatcaatgtctagaattggccgctgtattgataatggcccaatggaaggctggcaaggtttaattaaagaaatgcgagaagttctttatccgaaggcaaatagctatgaagagatggaaaaagcctttaaagcaagtattgaatactatattaattatgatcctcaggagcgcttcaatggcaagagcgcaggtcaggttagaaaagaagctaagaataatccagagaatataatttcatatccaataaaacaagataaaagatataaagacttttggaaaaagattgatgaaaagaaaaatcagctcgcacaatagcgaactgattaatcaaattaatttatatatttaagctgtctacttgacacggtacggatcatttcgagtagtcgtctttgtttgttgaaggtgaaatttcaacaaatctatcttagtcagaacttggagttatctattagtaccagccatttgcttgccagaaacttttagcagcgctccaagagccatatctagatttgacataattatccgctacacgttcttggttagcagctgaataatcaccattcaaataagatgaagaaagttgatacttacctacatattggccatttctagcactgtatgagccaccagattctttgcttgcaatccatgcctttgcactagcttcggaacctgtcgcggttgatgaatatgaactagttgttgtcgtcttaggtgtgtagttcacatttgaataagtgtatgaactttgactttggctagcttgtgtagtttgttgagctggcgtttgtgtttgagtgtaggtattttcttgtctagcttgagtattttagctagtagtataattagttgccaatacccattgatttaagccaagatcataccacttctgtccctttgaatcataagcagtttttataatcttccagttagtacctgcagctagagtttgaccagttgcaactggattttcatagttattgtaaacggtagtagcttgtgtagttgtatacactgctgcatcattttgcacaacggcagcttgtgcttcattattatctagttgattgattgcaccaatacctgcaagtgataaagcagcaacagcaatagtcttagttaaaatagatttagttttccaaaaacatctctccttaaattaaaacgtcaattactattcatcatttttgttttattattctcttgcaattgacattttatataatacctgcttcgagttgcagttccatcacagtcagatcacacaatgattaaagaaaaatgttttttcgtaacagttggaaatatttttaataaatctagatttctctgcaatatttgtaaaaatcatgcaatatatgaacaaaatttgacgacaaaataagcatccctacgccataaaagatcgttttagggatgcttatttaattaataatctaattcttgatccatacttgcaggccagccaccaataccacgtttttgatcaaggccacgcaatgtctccatctcttcagcagtaaattcaaaatcaaaaatatccaaattatccttcatgtgtaacggattcgtcgagccaggaataatcatgatattttcttgtaccaagaagtgtaacgcaatttgtggcactgtcttattatacttctcagccaaagaaagtaaggttgggtcattaaataaagccttcattccttcaccgagtggtgaccaagattcatgtacaatattattttcaattaaatatttatgcattttcttttgttgcttaaagacagacgtttcaatttgatcaactactggcttagtatcgaaattattcataatttcatttacttgatcatggttgaagttactcagtccaattgaacgtagctttcccgcctgatatgcctcctcaagtgcctggtaagtacctaaactatcagacataggccagtgaataatcattaaatcaaaatagtcttgctgggcgtgaattaacgattcatcaatcccattcttcgtctctctataaccacttgtttgcgctttagtggtcaaaaaaatgtcttcacgtttaatgccgcttttgttaatagcattgcctacttctgcttcattactgtatgcttgagcagtatcaattaaccgatatccagccttcaaagcctcgacaaccgctccttcagtaattctaggctgaattctatatgttccaaagccgaagattggagtttttacaccgttattaaaagttaaatatttcatttttattcctcaatattttattcaggatcagatgcagagtgataagtaatactaaatccagcttgatattccttacctggctccaaatgattcataccatatttgtgctctagctcaccatcagcatcttctctatctgcaattccccaccatggctcaatgcatacataattagcggtatttggatattgtgaccaaatgccaacatatggtgcatttctagtccaaacattgatgtggaacttactcttatcagttctcaaagatactttattgtcatgaccatgtaattcataaatcaaggcatcatctttaaatagctcatcacttaaaccaataaaactatcagtcgaagctagagaacgattattccagtcaagatatgctcctttaagtgggatttttaccctagcaatagatggatgcatatcgaaataataatcttctttctcttccccattatttactggtaagttaaatccagggtgaccacctacaccaaaaatcatagtttcatctgatttattaactacgctaaagttttcttccaataaattattcatcaaattatagttaactctgaattcaaatttaaatggatacatttcacgcgttttttcattatctttcagtaagaacgtgatactttcttgtgtatgattctccacttcaaaatcacaatcacgggcaaaaccatgctgacccatatgataggtcttaccttgatacttatattcatcattcttaagtcgccctacaattggaaaaagtacaggtgcatgtctgccccagatctctggatcagcttgccacatatattcttcaccggtatgagctcctttaacgctctgaacttcagctccgtgatccgaaatcactacttcgatcatattattcttgattgtgtaatccataactaaatttccctctacatatcaaacagttaaaaatcataatgtaatcgcttaattacttatattttaacattaatgcgtcaataagccagaataaaaacaaaagaaaaaagcattcaaactttgaattgaatgcttcattcgtgattctttgatcaattagagaataaatttagttaagtctttattcataataatatcgcctaacttatcttcaacataggcttcagtaactgtgatttcacccatttccatatcaggcccttcgtaaagaacgtcttctaagagcttttcaagaatagttgaaagtcgacgagcaccaatattatcagtgccttggttaacatcaaaggcaatctccgcaattttatcaacggcttcttgggtgaaaactaacttaatgccatctgccttcattaaagcaatgtattgcttaagcaatgaattttgtggatccttcaagatcttgacaaaatcgtccttggttaaagcgttaagttcaacccgaattggaaaacgtccttgaagttctggaatcaaatcactaggcttactttcagcaaaggcacctgcagcaataaacaaaatatgatcagttgaaactgggccatattttgtatttacagttgagccttcaacgattggtaaaatatctctttgaacaccttcacgagaaacttcaccagaattacgtttattaccagcaataattttatcaatttcatcaataaagataattccgttattctggcttctttcaatagcatgttgatagatagcgtcatagtcaactaacttacgtgattcttcttgaatcaaaacttcacgtgcttcttttactgataaagtacgcttaacctttttcttaggcataagatcactaagcattgagcccatatccatccccatttgacccatcatgtcactcattgggttggccttaggagcttgttctacctctatggtaacttcgtgatcttcaagtaagcctttagctagcttttcagccacatccattcgtttgtttcttacatcagcagaaacatcctcttcatgatcttcttcgcgattattttctcccatcaacatagacatcatatcttgcatttgctgcatttgattttcacgacgttcatgtttctctgctggagctaacaaacgaactaattctttatttgcttctttagttgcttgagtctttacacgagcaaattggtccttttcttccattcgtacggcttcggaaaccaagtcacggaccattgattcaacgtcacgtcctacataacctacttcagtaaacttcgttgcctctactttaacaaagggagcttctacaatatcagctaaacgacgagcaatttcagttttacctacaccagtaggaccagccattaataaattcttaggcgttacttcacgttgcatttctttagataactgcattctacggtaacggttgtaaagagctatcgcaactgattttttagcttcatcttggccaataatatattcgtttaaaattttaactatttcttttggggtcttaatagccatttccttcactcctaaatttcatcagtgacaattttatcatcagtgaaaacatcaattcctgaagcaatctttacagcttcatgtgcaatttcatcggccttcatatcttttgcgtgtcgagtcatggcaatcgctgcggcttgagcaaaattaccacctgaaccaattgcaactacgttttcatcaggttcaagtacttcaccattacctgaaattaaaagtaggtctttgtcatcaaaagcaatcaacattgcatttaatttttgtagagttggatccttacgccatgcttgagccatttccacggcagcacgacgaagatcgcctgagtagctttcgagcttgccctcaagcatatcttgaaggctgactgcatcagctacaccaccggcaaaaccaattactacacgatcatggtaaatacgacgaatcttacgcgctgttgccttggcaataactttttcgcctaaggttacttgtccatcaccggcaattgctgtttttccattaaatcttactgaacaaattgttgtcatgttaaacctcaactttctttattacgaggaaaatatttttgataatctgattttaaatgagccattgttacatgagtatagatttgcgttgctgatagactactgtgtcctaataactcttggacacttcgcaaatctgctccattattaagcatcgcggtagcaaagctatgtcgcaactcatgtgggtgtactttaccactaattcctgcctgattaaaagttttttgcattacagtttcaattccgcggctagtaatgccagttccttgattatttaaaaatacatgctgttcatcatcatttttaagtaataatggacgtgcattttctaaataagcaatcaaagatttttttgttttatcatcaaaagcaacatagcggtctttatttcctttaccgtgaaccaaaattgtctgtaagtctaaatcaagttgattcaaagtaagattactaacctcacttacccgcatccctgtcgcataaaacagttcaaacattgccaaatttctcatcgtcaaaggcttatttcctttcaatgaatcaaaaacctgctttaattcaggctggtaaaaaaattgcggtaattttttctcaccacggcgtaaagtaataccctgagttggatcgattgccactagtttgcggcgggttaaaaagtggtaaaaagaatgcaggctggacatcttgcgcaactgactactacgggctaacttgcgttctgctaaatgttgtagataaacctggatatcacgttctcttactttagtccaacctgggaatccaccattttcatgccaaaacctttccgcttcatgcaaatctgtttgataagctaaaacggttttcgcactataatgacgctcattttgtaaatatgataaaaattgatctaactcactttgcctttggttcattaatctaaaacttccgtcttaaattcatctaaactagcaagaccacgttcactgaccttctcatggcgctcacgcttcttgcgaatcttcttaccctctagtggaggtagcaaagcaaaactagcattcattggttggaaatgtttagcactcgtagtagttatgtagttagccattgagcctaacgcagtatcttttgggaaagccacagtatctttccccatagcttcacgtgctgcattaattcctgctactaagccactacctgcactttctacatagccttcaacacctgtcatctggcctgcaaaaaataatccaggctgctcttttgcctcgtaagaagctgtcaaaacttctggtgaagccatataagtattacgatgcattttaccataacgaacgaaacgtgcattttctaagcctgggatcattgaaaatactcgtttttgttcaccaaatttcaaatgagtttggaaaccaacaatattatacattgaagctgcagcattatcttggcgcaactgtacaactgcataaggagttttgcctgtatgtggatcttctaatcctactggtttaagtggaccaaaaagcattgttttagccccacgcgctgccattacttcaattggcatacacccctcaaaaacatcgctattttcaaaaccatgtaattgcgcagtttcagcgttaattaattcctgactaaacttttcatattgctctttagtcataggacaattcaaatatgcagcttcaccacgatcataacgcgactttttataaacaattttcatatcaatcgagtcagcggccacaatcggagctgctgcatcaaagaaatgtaaactatcagttccagaaaatttttgaatctgtccagctaaagcatcactagttaacggaccagttgcaataattgtaatcccatctttcggaatttcagtaacttcttcttcgtgaacagttacattctctaacccacgcaaagtgtcagttacgtatttactgaaactatcacgatcaacggctaatgctccacctgcaggcacttgagttttgtcggcagctttcatgatcaatgaatctaaatgacgcatttcttcttttaaaagacctacagcattagataattgatttgatctcattgaattggtacaaaccagttccgcaaattcaccagtttcatgagctggagtctccttttttggtcgcatttcataaaggtcaacatgaataccacgcttagctaattgccaagttgcttcactaccagcaagacctgcaccaataactgttacattttttggcatttactcacctatattttctatgttaattgtttttttcgttttcactgtcttcacgataatcaccgttaggacaaagaatcactggaccttttttagaatgcttttctactaaaaagtggccatcatttggacaatttctgccaattggcttgtcccatgagacaaagtcgcattctggataacgagaacagccgtagaatttacgatttctacgtgatttcttttcgacaacctgacctttgccacattttggacaaactacaccgatttctttaatgattggcttagtattacgacaatctgggaaacgagaacaagcatagaacttgccatagcgtcccatcttaatcaccattggtgcaccacaaatatcacaattaaagccagctggttcatccttgatttgtaccttttcgatttcactatcagccttatttaattctttcttaaacggttgatagtattcgtcaacaacatgaacccaatcctttttaccatcttcgacttcatccaattcattttcaagtcgggcggtgtaatcaacatcagtaatatctgggaagaagctttcaattaagccatcaacaatttcacctaattcagttggtacaattgaacgaccatcaagtttaacataatagcggcgttgaattgtatctattgtaggtgcataagttgaaggacggcccacgccattttcttccaatgcgtgaactaatgatgcttcagtatagcgtgctggtggtaacgtaaagtgctgtttgttatcggacttagtcatcttgaccttgtcaccctcttcaagatcaggtaagtcaacattcttttcttgttgattatcataaaccttggtgaaaccagcaaatttcaatttagaaccagtagttctaaaaatcacaccattttgaacaatatctgcacgaacagtatcataaacagctggggtcatttcactggccaaaaaacgtgaccaaatcaatttgtataaacgatattgttccgtagttaggacactctttaatgactccggtgtgcgatatacagatgttgggcgaatggcctcgtgagcatcttgtgcgtcttcttgattcttaaaatggcgttgactcttagctgcaaattctgcaccataattttcatgcaaaaacttagaagcctcttgttgggcaactggtgatgttctcttagagtcagttctcatataagtaatcaaaccaactgttccttgcttacctaaagaaatcccttcatataattgctgagcaatactcatagttctacgagtacgataacctaaacgcttattggcttcttgctgcattgtagaagttgtaaatggggctgctggctgacgccgacgttgccgagcaacaactttatctactacaaagtcctttttcttatcgattttagccaaaacatccttaacagaatcgatattaggcaattctttctttttgccatcaacaccataaaaggcagatttaaaagtttctttacccttagcaaattccgcatcaattgaccaatattcttttggcttaaagttcttgatctccttttcacgatcaatcactaattttaaggcaactgattgtacacgtcctgcagataaaccttttttaactttggcccaaagaattggtgaaagtgaataccctacaattcgatcaagtacacgtcttgcctgttgggcatcaaccgtatccatatcaattgtccggggatgcttgaagctttctttaactgcatccttggtaacttcgttaaaagttactctattcttggctttttcgtcaagattcaatgcgtgcgctacgtgccaagcaattgcttcgccttcacgatcggggtcggatgctaaataaacatccttagccttcttggcttcgctttttaattctttaatggtatcgcctttaccacgaatggaaatatacttaggcttatagtcgtcttcaaagtcgattcccatttgtgacttaggcaaatcacgaatatgccccttggaagcaataacgtgatagtttcttcctaaatatttttcaatagtcttagcttttgcaggtgattccacaatgactaaggtctttttacgtttttttgttgttttacttttcgctttagtaggcattaactgcctccttaattcttattttattttatgggtacagtccaaaaataactaatactttctgaattgtcaaatctttatcttgttaaatttaaaatcaacaattggcgtagctcctgcttcaattaattgattgggacctgcagacaatgcattagtaattggtccaggtactgcataaatatcgcgattttcttgtaacgctaaattagcagtaatcagtgaacccgacttttctttagcctcagtaacgattatactttgacttaagccggccaagatacggttgcgttcaggaaaacgatacggacgcggtggtgtatcaggcaaatattcactaatcaatagtcccttttgcacaatctcttcttgtaaagcaaaattttgcattggatatgaaaaatttaaaccattgccaataaccgcaattgtttttccttggttgaaaagtgcagccttatgagctaaggcatcaacgccttttgctaagccacttgctacaacctgaccagattgcacaatattaggtaccaagcgattaataacatcttgactatacttagtcggatagcgtgagccaacaattgtaatgatttctttttgcagtaaagaaatatctcctcgggtaaacaataccataggtggtcgataaatttgacgtagtttttctggatatgcttcatcgaaaaaactgattacgtcacactgctgttcaatttgttgtaccattcgatccaactgatcatcctgaaaagcgcgatagcatgcatccattagttcctcagttaattcaatttgttctaattcttcaaattcaatttctgtttcatcagttacctgattagcaattgtcagcaatttaacataaccaatccctttttgcaattttaattttagtagaaattctgtttttttcataaaaaaagccctccactatttattacgcaaaaagagaccattatttttttataaattgaaatttattcaaaaaaatcactgactggagcaaatgttttgcggtgaattggcgtagggccatactttttcaaggcttcaatgtgctccttggtgccgtatcctgcattatgatgaaagcaatattgagggtatattctatcataatcatccatcaattgatctcgaaagaccttggccacaattgaagctgccgcaattgaattcgacttagcatctcccttaatcaatttaacttggggtagatttactggcacattcattgcatctaccaaaagtgcattcggcttaacatcaagtgctcgtactgcttgagccatcgcttgacggtcagcttcataaatattaatttgatcgattacctctgcactttttactccaataccaacactaactgcttccgctaaaattttaggatataacttcaatcgtttctctgggctcaatttcttcgagtcgtttacatctaataaatcaaaatcttgatcaattatcacagcagcagttactaccggtccagctaaagggccacgtcctacctcatcaacacccgctactaattgtcccttttcccagaactttttttcataagaaaagcgacgcaaaaactcttctttttttgctagtaattttgcttgacgcttacgataactaactaacaatttttgtacgccggcccgcggatctgcctcaagttcgttaatttgggcttcagagacctcagatttcaacagctcttttatttctttaattgtcatggtctatctaacgtaatccttccgattgcacccttacgcaatttttgtaacataaataatgaaaaacgatcataatcatcacgcatgccatatttttcagtcattgacaaaagcaaatctggatcagccatatcagcaatttgctgttcaggtaatttagaaaatttaagcaaatccttagcataaaattcacgtaaatttttcaaaacaaataatgctacatcatctgcatgaaaaacactatccttaattgcaccgaaagcagctaatttataaccaacttcctgatcagaaaatttaggccataaaatccctggtgtatcgagcacttgaatattagcatttgttttcagccatctttgtcccttagttacacctggtttgttaccgacttcagccacgttccgaccaactaaacgattaatcaccgttgacttgccacagttaggaatacctgccaaagcaattctaatagtaggatttgaggcccctcgtgcttctagcttctctgttttggcagctgccgccttttttactaaggaaaccaacttctgcatattagtattgtgcaaggagtcaagtgccaaaacatacttattatctccagctaattctgctgcccatgcctttgttaaaactggatcagctaaatcagccttatttaagataataatatgtggtttattaccaactagtccttcaatcattggatttcttgaagcttgcggaattcgggcatcaagtacttccaccaaaacatcaatcagtcctaacttatcttccagttgattacgagccttgttcatatgccccggataccattgaattgttgccatattatctcttctttctaaaattaatcattttcatcatctaagaacaccacttctgacatcaaaatctgtctatataaagccagaaagcctcgacgatattttctctcttgttgtgcaattttacctaaatagtcacgttcttgtctaaaagcatatctatatacctcagctctaaattctttctgatcatcgggtaattctttttgtttaattgtatactttatttccctagcaaaatcaaccatagaagtttgattcatttgtgcccttaaatcgaattttaattgttttcgaatctttttaggtaaatagatctttttcatttgatccatagcatactcaatcattgccacacgaactcgatcaacttcctttctttgatcaaaatcaggtatatctttgtccaagatcatgtgaaaaacaattgttggaacaatcatacttagtaaaataagcgtaatttcactcaccaaaattaaatggaaatctgctacattaatacgtaaatcatataacgtatatgctaaagcaaaagtaactgctccatgaatgccacccagactaaaaatcaatgcttctttattactcgtttttcctttaatagaagggctaaatcgataataaaagtatctaataagcaaattagctaggtataaaattattccgatcaaaatcgcatcaattgtttgttgattaaaatgtcttccctcattgaccgaacaatgatgattcccaaaagcaaaaagacaatcccatttaaaatatcaatcagaagttgcgataattgattactgttataaaaaataaaggcattagtaagcctgcttcgctcagattcaacgttatgaatcaatccggctgcaacgactgcaataattccagaaacgtgaatttcttctgctaaaaaatatattattaacggtgtcaaaaagaatatgacatcaaccggcattgcaacaccagcagataaatgatatttggagcgaaaactttcctgacgcaagaaaactaataaagtagccaccaaagctcctagaaaaaacctccacctgcagaatataaaaaattacctattgcttgtccaatccgtaattcttgatgcaagtaccaatcaactgccatattaagcaaaatgatacctgaagcgtcattaaacaaagactcatcttttaggtaaaaagcaatcttcttaggcagcttcaatccatgtgttacagattctgttgctgtagcatctgttggcgttgaaattgcagccagaataaaagccagtggtagagagacccatactaaaatagatcccgaatcccgcagttatagttgccaagataatcataataaccgttaacccaactattgcgccccacgaacgtaaaacattatacaacctagtacgttgtccctcaaaaaatagtaatggcgctacaatcaagcccataaataattccgagctaaagtcctcaattaatgaattagtttgtggtactagtgcaatagccgctccaatcgccattgcaatgtaattaactgatattctcttcaaaaagcgttgttgaataatcgtcgcaaatgctaccgcaaagacaataaaaccaataaaaattactacctgcatttttctacccacttaataaaaaagcccaggcatctatcaggcttgggcttaatacatcattttgtcttcatacattcgataagcacgatcaaaaattgacatacttggtaaataactagcattcaattccaaataatctgacaatttctcataatcttgttcttgcttaggaaaagtcaggtcatgctgtgcattattcgcaaattgagctacgtcatcagctgaatctgcatccctttgcgtcattaaatatcgataaaaactttctcggtaagccataattactccacataatataagatcgcataagcaccattgccagcatgtgttgcgataattggacttgtctctgccactaaaacattaatcgcaggattgattgcacgaattttttcagctaattcttccattaattcaggtgtatcaacgtacgaaatgcctacttctttaatatgctctttattatctgcgatttcttttaacactcgttcatcaaaagcacgtgtaaatttcttacctcgtccttttttggctacgattaacttaccttgtggcatctgaagagcgattctaatattaagcatagtagcaattcgaccagaaagtgcacctaaacggccacccttgattaagttttgtaaattaactaccatcatttccagtttttgagtactacgaatctttttaacatgatcaataatctcagccatgcttttaccagcctgagcatccttagcagcagccaaaacttggaagccttctgccctgtcggttagttcagagtcaataattgtaacattatcgctttgacctgcaatttctgcagcttgacgagcggcatctatcgtaccacttaatgatttagctaagaaaataccaatcacttgactgccatctgcggttaattttttaatcacatcaacaaaacggccaattggtggctgactagtcttaggtaagctctccgcttcattcatcttcttgacaaaatcacttctagtgatatcaatcccatccacatatgacttaccgtcgatggtaatcgtcaatgggactactgtaatgtcatatttttcaacttcttctggtgttaattggacggaagagtccgtcataacttttatcttcgacaacgtattcgccttcaattctaatttgtttacccgatttatgataaaatgtaagcaacatatatactgtattgtatcaaaaaactattagaagaaaaaaggattgattacacttcatgaaaattagcaaactttggcagcaaccagaacaacgatcagaaaggtactaccttctagataatatttttagtgccataactcatgggattggtttcggactagcagttaccggcttagtaattttaattgtaaaggcagctcatacaggcagcccgatgcgagttgttactttcacaatttatggctcttgcctggtactgctttatttattttccacactatatcacagtttagtttttacacgggccaaaaatatttttcaaatttttgaccattcctcaatctttcttttgattgcaggatcttatactccatattcacttgttgcaattggtggagcctggggttggactttatttggcttgatctggggcctaaccatctttggcatcatttactacatcttcaatcgtggtaaacacgtcatacttgatacaatcctctatgttgcaatgggatggttagttatcttgtcaggatcttatttatatgttcgcttaagtccaactggattctggctattagttagtggtggcattgcttacacaatcggcgcgattctgttcagtatgcgcaatgttccctttatccatactatctggcatttatttgttatgctcggttcaatcttaatgtacttttccgttttactttatgtttaaaaaatgtagcagttgaattctgctacatttttctttctattcaattgtagtcaaatagctttcaatcgcttcttgattattctcaacttcacctgaaacaactaactctcgaattttattcaaagtctgccccaattttgcacctggtcgcatcccgcgatctattaaaaatctcccatcaacggctagttccgacgcttttttaataggtaaagccatataacgatcaactaaagcttctgaagaaattggttgaccaacaatatgagcaacgtcaatcgtattaattaatgtctcttcccctgctaagaataattcataatcactaggagcatgactagaaagtaaatcaaatagattaataattctttcgacttgctcagtcatagcattagagtttttccagtcacgcataaaacgatgaatttgttcattcggtaatttcaatagcaaaattatcagtgaccacaaactattttccatcgttggactgaattttaactgtgggaaaatagctagttgatctttttttccgccaaaatcaggtacatcttcactcaaatttgtatcaagaaaaacctgaaaagcttgccgagcatgtggtcctaaacctaattttacaaattcttctcgaattcgttcaactgaaatttttttaagtaatttatgattatccttaattgcctgttgggtcttgctttctaacttaaattcaagttgactcataaaacgtacggcccgcatcattcgcaaagcatcctcgtgaaatcttttttctggatcacctacagcacgaatgacatggtttttgagatcatctagtccgttaaataagtcaacaatttgccctcgtgtatccattgccagagcgttaatcgtaaagtctctacgctttaaatcttcatctaagttttgaacaaatgttacatgatctggacgacgaaaatcttgataacccgattctgttctaaaagtggtaatctcataactttcaccaccataaaggacagtcaccgttccatgtttaattcctgtatcaattgacttatcaaataactcttttacctcttctggataagcactagtagtaatgtctacatcatgaacatgacgatgtaacaaaacatcgcggacagaaccacccacaaagtacgcttcaaagcctgcattttctaatatctgtaacacgggcattgccttggtaaaaatttctggtaaattatctatctttatcatattaaaatctcaattcttattgtctttattattacttttgctatacactttgttaaaattgaggaaagacataaaggaggtaatcattatgcgtaagattgacaaaagtatcttaattgatatcctcatgatcgcgctaggctgtgctatttccgctttaagtctagacatgatttctgtccccaataaactagccgacggcggactaagtggtatttcacttcttctgcggcatttttggggcatcaacatgggactatcgacccttgtattgaatattccactaattttgttaggctatcgctttatgggcaaacgtcttttagcctatacaatctggggaacgctcagtctttcctttttcttatggttttggcattcagtacctattataaaacaattagatttagaacacgacctcttcctttcagcaatttctgctgggttattgtctggaatcggattagggttagtatttagatataatggtacttccggtggaactgatattattgcccgaatctgtcagataaaatttggtatttcgtctggcaaaatgcttttagcttgtgatgcaatagtactcttcgcatccctatcttacctagacatcaagcatatgctatacacattattagcttcttttgtcttatcccgagtaatggataccgttcagcaaggtgcatacacagcccgtggtttattaattatctctgacaaatatgaacaaattggcaagatgattgatttaaaactaaatcgtggtttcacatatctaaaagctttaggtggctatcaacaaaatgaaaaacgtgtaatttatgttgtagtcgcaccgcgggaaattccatcaatcaaagctttaatcaagcaagaagatccacatgcttttgtttcaataattgaggtaaatgaggcaatgggagaaggatttacttataaaaaaccacatcgctttttcatccacaagtaaaaagctataccatgatgcatttcatgatatagcttttcttttactaataattaataattacagtcaatacgttattagctttaacgtattcgttttctccaatttgaatgaatggccgttcatcaatttctttatggccaagatttttaactttagagccttgtttaacaaacttacctggaattggctgaccatttttatcataaacatatgatggatgcttaatgcggttaattgtctcggctgtgtccttaatgtatggtaaaaatgccccttccttaacgaatttattcttaccaatcttcacaaaattattgccattaattgatttaatgcctaggatcttgtaaacacggcccttttttaaatgtccaactttttctcctttacggttaaaaatcgttgcttttctagtcaagtttaactttttaccctgacgaattggattagttgtagctgcgttaactgtctgagcagtcatcgcacctaaacttaaggaggctaagactactcctgccatatacataatttttttgttcatcatgatctcatcccctaatcattacttaatcttcttacctatattttaacaaaaaatgcagaggttatacacttttctctatttttatttatgggatggataacacttattctttgcaatctttcatggcaagaactaatcttagcttgtaagcgtttgtcaatatcaagcaatcaagaggatgaaaacaatgccaaaaaacagttactcccaagaagctttcgttcatgtctatttacttcttgggaattaatggggtaattgggtccggtgcctttttaatacctcaaacaatctataaagatatgaacttgatgagtgttttcataacaatttgtgctgctcttacagtaagtatggttactctttgttatgctgacttgtcaagtcgttttactggatcaggcgcagcttggctttattcatatcacgcctttgggcgatttactggctacgaacttggaatatatacttggtttttaggatgctgtacatatgcggcagaaatagtagctttgttaactattttaaagactttgtcccctgtttttagtaatcacgctgttcactacgggatagctattggaataattgtgctaattgtgctgtttacgattattaacttatttggtcggacaattgtaaaattagtcgataacttatcctctgctgccaaaatgattactattctgatttttatcatcattggtgccttttttattcataaaatgaactttacacctgtgattcctaaagcagcaaccctaggtgttggtccttacttcaaacattttggtgctgcatttagtgtagtattttacatgtttactggattctcctttattccgattgccccaaaacagatgaataatccagagaaaaatattcccaaagtattgatctcagtgatgatcactgtgactattttatatgcattaatgatgttagtagctatcgggattttaggatccaagatggttaattacagtacgcctattgctgtagcctttcaaaaggccgttggtgattggggctacgttctagtgattgcagggatgctgattagtgttatcggcgttgcttttgcaggatctttcaatactccatcgttgattgcttctcttgactccatcgttgattgcttctcttgctaatgagcacgcaatgttacctaaatggattggaaaaaagaacaagcatgatgctgcttgggtagctattttactcagtgcaatcatcactatgattttaatcacacaatcatacctcttcttggtatcttgcattgtattggcttcatttattcaatatgtaccatctatcttagcagtaatcaaattcaagcatactaatgaatttccaaataacggttttaagctcccattcggctatgttattccagctttggcattaattatttcatgctacatggtaaccaatttcacttggaaaactattttggtcggaatagtcgtaggggtattagccgcagtagcttacttcttcattgaaaaagatgaagaaaagcatcaaaagtatttgtcaaaaatgcgtaataaataattttcaagttataaggacgatgactagaaactgtcaaatcttttgtgtaaatagttctttctcgtaaattgattttttaattatttatttaatcaaagtaggattctaaggtgtcctgaacctgaccaaagcctttatgaattcgattgaaataacggtcattgtagctcattgcctgaatgccaataaaagcatcaagcgactgttcagttggaaattctgccttaggcttagctttacgcttgatgacgttgttaaaggattcaatcatattggttgaataaattgaagctctgatttgtttgggataattgtagaagactagcagatcgggctcaatttccttcaaacctttgatgacatggctataagctttattccatttggcatagaatttgtgcaagacagctgcagcttcttttttgtttgtctgttgatgcacctgtttgaattcgttcatgatcttttcacgatcgtcgacgcgtactttagcgcagatattgcgcatgacatgaaccaaacagcgttgaaaatgagctttaggataagtcctggccaaggctgttttcatgccaacaacaccatcagaaagaaagagttcaacttgcttcaagcctctggacttcatgttttgaagcatctctgtccagacttcaatgttctcactaggagcaatgcagtagtcaatgacttccttatgtccattaggtttaatgccaatggcaatatagactgcttcacgctcaaacgtttctcggcgcaaaggaaggtatgtcgcatccaaatagacgcagaaaaacttgtcgcttagcttgcgtttgtggtaagcctcaacctttggaatcatctgcttggaaatatttgatacctgagctggactgtaatggctgccatacatcttttcaattagatcggctatttccctggtggtcacgccattggagtaaagcttgataatcatgctttccaagatatccgagtgctgcttgtagtcaggcagcgtgtgctgatgaaattgaccgttgcgatcccgaggcacttgcacttcaattgggccaaattgcgtatcaactttgcggaaataagcaccatttctagagttgccagtattccagccatttctggcatagggatcatagcccagaaaggcagtcaattcagcttctagcaagttattaacagcctgttgtagttctttgcgcaataaatcatttattttgtctggattgaatagagcttgagcaaaatctttggtaaaatcattcatgaaggagttcttctttctgtatgtgtttttttgttcaaaccaatcatacgagaaaggaactcctttttctaatgtttaaagaaataaatttaaggaatcattcatccttacacaaactattttacagtctcgatgactatccaatatcgcccttattttttgatcaattaagactttttagtctgcttttaaatctatttttcaacttatacattatgaaagcccatctcctcttaataatatttagtgctaaactgttagatagattagtattagaaaagagcaacaacaaatgagtaatcagaaagctaaaataaataataccgaaattaaaactagagtatctcacttcagaccaagccagtaaaaaaattcaagttaacataaaaggaaaaccatatgtctgaagagataattaacacagtcacaacaaaaaatgattttaagagtgcattaagaaatgcgggtattaaagatgatgataccgtattagttcatactgcactaagtaaattctattacgttcctaatggtccagaaaccattgtcgaagccttaaaagaagctgtgcctaatggaacaataatgatgccctcacaagtttctacgaattgtgatccagccacttgggaatatccaccagtacaaaaatctttgattcaagtagttaaggatgctatgccaccttataatcctacaacatcaatgacagaaggcttaggggttacgccagagtatttcagaactttgccagatgttgttcgaagtacccatccttacttgccaattgctatttggggcaaaaacaaagtaaagattgcacagaatcaacctttaaatattccttatggaattgacagtcctttagattatttgtaccagaataatggcaaaactatctttttaggcactgattatgaaacgtgtacagttttgcactatgcagaatccacaattggtagaaaaaccgaaacatgttctgctgcaactagtctggatgaaagcggcaaaactatttggactgaatatcaaaatattgatatggattcatatgatgactttaatgaattagggacagagtttgaagcaaagcatccctctgctatcaaaaaggttaagttaaacaatggtgtcatcaaagcaataaatgtaaaaccgctaattgattttgctagaaaatggtttataaaaaaagacaataatcattcaatttaataataaaaggaagaagtcactttcaacttcttcctttttctttatttaatctttgttaaaacctttgcacctatatttaaacctacactatgcgatttaccgccccaatcacgttcatcataattatccatatcagctaaagtatctgcagtgaaaagaaattgtgcaaaatcaatctttctaaactgagcacatgctgctaaagctgcacattccatttctacagttgacgcgcctaactgacgaaattgtgccacttttttaggcgtttctctaaagaaaccatctgttgtccaagtcgttatctcgtcatattctatatttagctcaactaaaatcttttctacttccttcaaaaatatagaatctagttccacaagttgtccaggattcatatagtgaaaagatgtcccttcatctcgaattgcacgtgttggaagtagcatcgcattttcaggtaaatctactaaggcacctgctgttccaatggttaacaccttttctactccataagcaattagccattcaagcaactgtacagctgccggtgctcccaagggcgcttgacacaaagtgaaaaattcgttattaatttgaacttcataaattttaggattaaaagaacatgactcaaattcacctaaagtacggtgaaaatggtgatctaaaaatgcattaatttctttttccggcacgaatgcgtaaagcaatcttggatgaaaatgaaatggttcttgatcgtgatttggttcaagaaccgcatgaggatgtttgtcaaagtctaaaatgaatggttgtttgttcatattttacactccatttttagttgaaatattatcataaactcgctaatacctgagatccaatattcaagctaacgctatatgaatcatggccccagttacgtttatcatagttatccatatcagctaaactatcggcagtaaacaaaatttgtgcaaaacttatatttctaaattctgcacaagcagctaaagctgagcactccatttctacagtttttgcacctagttttttagcttgcaaaacttgattaggtgtttctctaaaaaatccatctgttgtccaagttgttccctcttcatattggaaacctaaattttttatttcattctcaactcttcttacaaaatttttatctaatgcaataatcttacttggttctttgtagtaaaaagatgtcccctctccgcgaatcgcttcttgagggacaaacatcgtgttttcaggtagattatccaaagctcctgcgtttccaacagataaaacttgtttaactccataattgatcaaccagtctaaaaactttgttgaagctggtgctcccactggagcttgacataacgtaattagttgattattgacttccacttcatatattttaggtctaaacgaaacagttttaaatttgcccagagtcttatgagagtgtttatctaaaaacgagttaatttcatcatctgggacaaatgcaaaaagcaatttttcatgaaacttatactctaaattttcgactccaggttctattacagcttttttacttaaatcaatatctaaaacaaatgatccttcattcatatacgcgtggtgctagttaaatcgttctagacaataagccaaattataagctaaaattgcaatttccaaccggctttgaaagcctatcagactacgtgctcgattgttctcggcattgtaataggtcagaagcgaaaagtcgctttcaattgttctgcgaatagccatcaattgatgatcattgtgctttttagctcctgtcatatttttacgatatggtgtccaaagttcgtaacccatttgttttagctgttgatgcagttctttgcctaaatagccttcgtcgccaagaagatagtaattagatggatgggtattttctatcagttcaactgtctccctggcatcatgaactgatgcctttgttacgacataatcaagaatgtaaccgtcatcgctaacaatggcatgaactttgaaaccatagaagtaaattttcttggtggccttataaccaatgttggcataaccgcgaaaaattttagcacgatagtttcgaattggttggcaaacaggtaccggaaagctgtcaatgatcaagaactgtccattcaggtcaacctttttattcatttcttgccgtatctgataaatcaattgcaatagctgacgtgaacgccgattaaaacgtgagtgtgataaacaattgaaacattcacagaatcttctttgtgattcaattcctgtcttagcttgccagataagtaaagccaaaatcagactgtccgtagttttaatttgatcaatatttcgccgatgagtaaactcagccggtgcatacaaacgataccagtgccgacaaattatcactaaatctttaaaactaacttgtaaatggtggctaaaacgcttaagcttaaggcagttcaatcagatcagactcttttctattattactatttacaagtcgagtctaacaagattggacttttttattaactaaaacgatttaactagcaccacgcgtattcatatatattctcccttaatcaataaatggatagtcttcattaaagtaatgatcaataaaaatttgatgttgcttgttaaaaatcttggataatttatctttagaaaaatacttcagatcaagagtttcagagctaatctcttttgacattttttctactaattcaacagttactgcctgtgccacatcttgattaggataatgctggataaaattagttgaaacgcctaatagtgacttagttcttacttttaagccagtttcttctaaaaattctcgaacgcatgcttttggagctgattctccaaattctaaagcaccaccaggtaagccccatgcattaaaatctgatcttttttgaagtaagatttcattcttgctattagccaaaattccaccagcaaaatttagaataattggttcatgaccaactttttggcgtaaggtcttaatatagtttttaaccatcgctagtcctctacttgaatatcattcatcacaatttcaacttcatcgtctaaattaatctgactagtaaaagcatactcgggaataaaaccaagataatctttttcattccaccatgagcgcattgtttcttcaccaaaagaatgttcatgacgagttttatggcgtttcattgtttcttcaaacggaatatcaaaataataggcataaatttgatcaccaaaaagctgctgagattttttgaataaatcagcataccatttcgcattcaagataccttctaaaatagtgtaagaacagtgatgataaccatactcaagcaagttttctaataatggcaaagcaaatgtcttttctccgtctttaacattcagcatttctcttctaactgtatcttgtggaatcaatagtgtattgtgtggcaatcgacgatggatttctttagacagtgtagttttgccactgccagagtttcctcgaattataattaattttgatgtcatcatagaaatcttcactttcttaaaattaattcactgcatctctaattgttgcaaacttatcaaatgtataatctattataatctataccatgaattttaacaataggcagcattttccctttttgtcccatcaataatcctgcagaagcggctagcatgtcacagatagtttcaacattagttttatcttgatactgactttttcttaaaccagaaacaccatacaatccaattgctacttgagttgcaccttttttatcaattcttccatcactatcggtaattatgatagctactctgacttttaattgatcaaaaatatcatcactaattctcttagcaatttcatcacaatttttaggtaaaactattgcagtaccagcatcaattttatctacacctgcactagttaaaaacaaaccattcggcaaccacccaccaataaagttcttagatatctttagtttcttaccactcttatcttcggtttgatcaattataatctgaattagtcttggagcttttctaggtatttgctgatgcaaacgtaaggctaattgacttggattaatagaatttaagtgaacaaacagaccttcagatttagaaatcaatttagaagcaatacataaaacatcattatcgcgtatattaaatccttcatttttgattgtcctaattatttctgcacttaagttgcactttctctctattttcggaaaattatgcagcgcttcaattgtaatcatgactataacctcaaatcagatgttaatttgcccaaaacagtaatttcgtttctatcgcaatacttcaatgtttttatgatcggttaccatgatttatctggtatctttctcctttattaatggtattgttagcaaaacaacaccaaaatacactgcggatacaaaaaaacattacttttaagtctccaaatactttcataatactattgcttataaataatgaaatactaaccaagatctctgcaataaatgaaacagttgaaagcatagtcgacttattgctttctccataaatggcttcattactagtagctgaaatttgtcccgacatcattcccatcaatagttcaattaatagaaaaaggcaaagcagtaaatatttattttttagagtaccacttaatataaatgctccaatcatacttccagtattcaacaaagtaatcccttttgaattaaaggaagtagaaattttactaaataaaatcgaagagactgtaaaatattttgtgtaaggatgaataattccttaaatttatttctttaaacattagaaaaaggagttcctttctcgtatgattggtttgaacaaaaaaacacatacagaaagaagaactccttcatgaatgattttacaaaaaatatagcacaagctctattcaatcaagacaaaataaacgatttattgcgcaaagagctacaacaggctgttaataacttgctagaagctgaattgactgcctttctgggctatgatccctatgccagaaatggctggaatactggcaattctagaaatggtgcttatttccgcaaggttgatacccagtttggaccaattgaagtgcaagtgcctcgagatcgcaacggccagtttcatcagcacacgctgcctgactacaagcagcactctgatgttttggaaagcacgattatcaagctctactccaaaggcgtaactaccagagaaatcgctgacttgattgagaaaatgtatggcagtcattatagtccagcccaagtatcaaatatttccaagcagatgctccccaaggttgaggcttatcacaagcgcaagctaagcgacaagtttttctgtgtctatttggatgcgacataccttcctttgcgccgagaaacgtttgagcgtgaagcagtatatattgccattggcattaaacctaatggacataaagaagtcattgactactgcattgcgcctagtgagaacattgaagtctggacagagatgcttcaaaacatgaagtccagaggcttgaagcaagttgagctctttctttctgatggtgttgttggcatgaaagcggccttgaccaggacttatcctaaagctcattttcaacgctgcttggttcatgtcatgcgcaatatctgtgctaaagtccgggtggatgaccgcgaaaagatcatgaacgaattcaagcagatacatcaacagacaagccaaaaagaagctgcagctgtcttgcatgaattttatgcaaaatggaataaagcttatagccatgttatcaaaggtttgagggaaattgagcccgatctgctggtcttctacaattatcccaaacaaatcagagcttcaatttattcaaccaacatgattgaatcctttaacaacgtcatcaagcgtaaagctaagcctaaggcagaatttccaactgaacagtcgcttgatgtatttattggcatccaggcaatgagctacaatgaccgctatttcaaccgaattcataaaggctttggtcaggttcaggataccttagaatcctattttgattaaataaatgattaaaaaatcaatttacgagaaagaactatttacacaaaagatttgacagtttcctgcaatttgttttggatattcaaaatgtatatagtgagattcgcctaatgttataactttagatttaggattatttgaagtgtattctgaccgcttatattcattttcacgatacttttctgtaataacaatacttggtgttttatcacttatcctggtagtatttttcaaaaacgaatcattttcgtaggctgcttgtgcgtttaaattatccttttcatcaaatttcttcgcattttgctctgtagttgtccaaaactttttattttcttctggagtaaaaatttctctaagatcagcttcaattttttcttgaagttttgccatgtttttatttttctcaatataagctggttcctttggaggatttaacatgatttctctagtagttggctcaattcctacaaaagccttcaaattattgattttatctttcatttgcatagcatacacaccgccaatgctatgagccaaaattataactttttttgcattaaaatcgttaataattttagctaatttagtagcttcgtctgatactgtatagtcctttaaagacttgccactaaagccactattcaaataatctgatgcaaaatagccatacttattgggcaaagcttcaattacttttgaaaaagattgtgctgtatcaaaactaccaaagccattcaaaaaaacaactaatggatctccctttcgataggcaaaattaatcttgcctaattcagtttcaatatcgcttctttgcataaatttctccctttattaaaactttgaagtcgttatattttaattatttcttagcacaaataccttatgcccattttcatcatcttttaaatacacgaaactacttcgcttagctacattctgactagcggaattcttaggatgagttcttaaaatcaaataatcaagcttcaactgttcaaatgcgtatttcttaagaaattcgacagattcagtcataattcctaaatgttgaaaatcattagaaagccaatatcctacttcgccagattcatgattcaaattatgtaagtcaatcatgccagctggctgtccatcaactaaaataactaggttgaatgctgtaccatcaaccattttttgttgaaacattttaattgaatcggcttctttttgaacagaatcaattttgttggcccaaactaaccatttagaaaactcagtaagatttttttgaagttgatcaaataagtcttttgcttgccaagtctctggaagaactaattcgatttctttatttttagttagaaatttatgtaaaacaaaagcagtatgacacatttcggaaactgtcaaatcttttgtgtaaatagatctttctcgtaaattgattttttaattatttatttaatcaaagtaggattctaaggtgtcctgaacctgaccaaagcctttatgaattcgattgaaataacggtcattgtagctcattgcctgaatgccaataaaagcatcaagcgactgttcagttggaaactctgccttaggcttagctttgcgcttgatcacattgttaaatgattcaatcatgttagtcgaataaattgaagctctgatctgcttgggatagttataaaagaccagcagatctggttctatgtctttcaagcttctgataacatggctgtaaaccttgccccatttggtatagaagtcatgcaggacagctgtggcttcttctttgtttgtctgttgatgcacctgtttgaattcgttcatgatcttttcacgatcgtcgacgcgtactttagcgcagatattgcgcatgacatgaaccaaacagcgttgaaaatgagctttaggataagtcctggccaaggctgttttcatgccaacaacaccatcagaaagaaaaagctcaacttgctttaagcctcgggatttcatgttttgaagcatatctgtccagacttcaatgttctcgctaggtgcaatgcagtagtcaatgacctccttgtgcccattaggcttgatgccaatggcaatatagactgcttcacgctcaaatgtttctcggcgcaaaggaaggtatgtcgcatccaaatagacgcagaaaaacttgtcgcttagcttgcgtttgtggtaagcctcaacctttggaatcatctgcttggaaatatttgatacctgagctggactgtaatggctgccatacatcttttcaattagatcggctatttccctggtggtcacgcccttggagtaaagcttgataatcatgctttccaagatatccgagtgctgcttgtagccaggcagcgtgtgctgatgaaactgaccgttgcgatcccgaggcacttgcacttcaattgggccaaattgcgtatcaactttgcggaaataagcaccatttctagagttgccagtattccagccatttctggcatagggatcatagcccagaaaggcagtcaattcagcttctaacaagttattaacagcctgttgtagctctttgcgcaataaatcatttattttgtctggattgaatagagcttgagcaaaatctttggtaaaatcattcatgaaggagttcttctttctgtatgtgtttttttgttcaaaccaatcatacgagaaaggaacccctttttctaatgtttaaagaaataaatttaaggaatcattcatccttacacaaactattttacagtctcgcctgcggcatcatatcttgaatctgcttcttggcccgctttaatatttttcccggccatttttaccaaattgcccacctgcatatggctaatattaaagccagacaggcaattgactgctagagcagtattgcgataagtggcaacgctgcttacttctaagatgtttttgactgctaaaatactgtagcgcttgtatttgtcaaagcccattaattcatccaagggataccttgcttgtttgcctgggcagacatatcttcttctgacatacctaacttcgccaaaagccatattgattgagcgctcattcttcttatcaatctgatagccctgtgctttaaccttggtaatcatttcatcatcaactttagctaaagccaaggccatgatttccttaatcaggtttaagaagaaacagattatttttctttcacgcttaatataattatcttcagactttataatatttgcgatttcagttacaattgaattcataaaagaccagcttctaatgtgttttttgttcttaacatcagactactggtctttttgtttgagctcaagtccaaattcaaaggacttgggcttttttaattatttattcaacttaccgtaaaaaattatacacttagtgacgaaatttttgctattcaaagtgctcaaaaagagacgcgtaatcgttatctaaaaaaacaaaaagctatgttggcagaacatgatcttttacccgaaaaaaagcgcaaaccacgtgcccgcatgttatcagagctgaatttaaacaacgatgatgctattttaacttttgccaataaagttaaggttttcaccagtggacccgagttgtttgaccaaataattgctgatcttaagcaagctaaaacatcgattagtttagagttctacactttttataatgataatctaggaaagcgtgtcttacgggccttagaagaggcttctgctaaaggagtaaaagtcagagttatttatgatgtctctggctcacgtggtactaaacctgctttttttaatcatttaagagagcttggtggcgaagcacagcctttcatttctacttctaaaaagcattggtttactacaccacgactaaattatcatttacaccgcaaattaatcgtaatcgaccatcatattggctatattggtggctttaacatcggtgatcagtacgttaatcaatctaaaaaatttggtcattggcgcgatacacatttacgtgttgtgggtcaatcacctatcctaatggagacacgctttgccatggattggaatacttctatcagacgaactgcattacctaaatttgatctaagcgaattacatgcttttactgtcgaacgtaaagatcttgacaacgatgataacgtagcaatgcaaatcgtttcttcaggtcccgataaccaacattatggcattcgccgaggatatgagggcatcattgctggggctaaaaactatatctatattcaaacaccctatttaattcctgaagaatccattttagaagcattaattattgctgctaatagcggtgttgatgtacgcatcatgatcccttgcatgccagatcatccctttgtttaccgagctaccgaatattatgcaaaatatttagttgctcatggcgttaaaatttacaaatataatgatggcttcatccatgccaaaacaatggtttctggctccaatatctcatctgttggttcagccaatcaagacttcagaagttataccttaaacttcgaggttaacgcttttaattacaatattcaattaactcaagaacttaaacaaatttttgaaaaggacctagctagttgcagtcttctaactaatgaatactttaatcagcaatctaaatggcttaagtttaaacaatacttttcacgtctgttggcacctattttttagaaataataaaaccacgaagcaaaaacttcgtggtatttttttacagattattataaagatcctgcatttcatcatcttctggagctaacttaagatatctttctagcagttgttttgttatttcatcattattttgtacattaaaaaagattatcatttggcgcaaaaagtctggattatccttgaaatccggataagctagtaaaaattcgctctgtgctttctgaatatcatccaaatcctcatatgataatgccatattccaatgtgcctgtggctccacgctttcctcatctaagttactaaataaggcaatattctccttagcctggtgttcatgaacatataggttagatagctgcatacgtaaatcactattgtctggcgctacttttaaccccttttcaagtaagtcacgagctgtatccaattcattcaaattagctgctgcacgtgctcccattgaataaagtgtttcatccagttcattgtacgctaatcctgcttgagcagtcctcaatacttgttcattgtcatgctgatgatcataagcttgtgctaataatggatacgcatttacatagtcaggactttgctcaatcacttcatctaagaacttaattgcctgcttatcatcacctacagataagagaactaatcctgcttcatacttagaatcaatatctaaaatactatttgcatgtttacgaataactttggcagcttcttcataattacctaatttggcaaaagtcgcaaataatctttggtacagatttacttcactaaaagtactttgacgtttgattaaatcttgatataactcaagtgcttgttcataattaccacttaaatattcaatctctgctaaaccaaatttaatagcatcttcttctggagctaattgtagtgctcgtattaatttgtccttagctgtttctattaagccgttagtttggtaataatcagcttgtactaatagactatctaaataagctgaagagctctcagggacattatataaaagcgacagaccatcgtcatcatcgccatcatttaacataatctctgccaagtaaactttaaataaatcttctttaggaaatttagctattaaagctcgatatatttcttttgctaaatctgtaaaacctaagccagttaggttttctgctaaagatgacaagacctcgggatcatcattatctaaagcttcttttaaaaggtgtttgttttgtgaaaaatcatgattttgaattgcatctagtaattgttcagaataactcataatacctccaatcaagttaccattgtactaaaaaaagacgccggaacaaagtccaacgtcctatcacattagttaagctattacttaacggcatccttaagagctttacctggcttaaatgcaggtacttcactagctgggatttcgatttcatcaccagtttgtgggttacggcccttacgagcagcacggtgacgtacttcaaaagtaccaaaaccgattaattgtaccttttcacccttagcaaggttttcttgaattgaatcaaggatagcatcaacagtatttgcaacttgcttcttagttaacttagtttttgaagcaacttctgaaactaattcagccttatttgccatgaataattcacctcctgaatttgaacctaatgttcaaaaaatttttctttgtttaagctaaacaaggaaaaatgatcacaactaatcatgtttcctaaaaacaaaaatatcacaaaagccttataacaacaaggtctttgtgatattttgcttatcttttatttacgtttacgtggtaaaatcttgattggtgtaccagtaaaatcaaagttttgtcgtaattgattaatcaaaaatcgttcatatgagaagtgcatcagttctgggtcattcacaaatacaacaaaagtcggtggattcgtacttacttgggtcatgtaataaacacgcaatctcttacccttcaccattggagttggaactaacttacttgcttcaagcaacaagtcatttaagacactagattgaattctttgattttgattatcatagacttctttaaccatattaggaatttgatctaatctttgacctgtcttggcagaaacaaaaagaataggagcatagtccaaatattgaaattcatctctaatttcacgttcaaattctttagcgcttgtactattcttttttggcaaatcccatttgttaacgacaatgatgattccacgacccgcctcgtgagcatatccagccacatgcttgtcttgttctctaatgcctgtacttgcatcgaggacaaggaaaaccacgtctgagcgctcaatagcactcatagcgcgcattacagagtacttttctgtcttctcatacactttgcctcgtcttctgattccggcagtatcaacgaccttaaattttacaccatcatgggtaaacggcgtatcgacagcatcacgagttgttccttcttcattagcaacaattacccgatcttcaccaagtaatttgttaacaattgaagacttacctacatttggtcgaccaataacgctaaaagaaataacatcatcagcttcagtatctttatcgtcaggaaaatcattaacaatctgatcaagcaaatcaccaataccagtaccatgactacttgaaacaggaatcggatcccccaatcctaaactatagaaatcataaatatcgcttcgctgttcaggattatcagctttatttacagctaaaataactggctttttagtacggtaaagaagatgagctattctttcgtctaaatctgtcacgtgatttaccacattggttaacatcacgataacatctgcttcttcaattgcaatttctgcttgagctctgatttcttcctcgatcttgccaccttcccaggtaataccaccagtatcgatcaaatcaaacttatgccccatccattcggcttgagcataattacgatctcgggtaacaccaggtttgtcctcaacaatagctaaacgttgattaattattctattgaaaagtgttgatttaccaacattgggttgaccaacaattgcaacaactggtaaaaccatttctcgccctcctttactaatctaaacataaataaaaaagccgactcaagtcggcttttttataaaatgactacttacggtcctttaattggtcaccaatgatgtcacctaatgcaaagccgttgtcgttatcactcatgtacttcttgtttactgaattttcgttacgtgaacgacgtggacgagaattatgattttctgaagaagcatttgagtcagcagccttgattgaaagtgagattcttctatcacttgggtcaatgttcaaaaccttaaccttaacactttgaccaacctttaaaacatcgcttggcttgtcaacatgcttgtttgagatttctgaaacgtgtaccaaaccttgaataccatcagcgacttcaacgaaagcaccaaagttagttaatgactttacttcgccttcaaaaatatcgccttcgtttaagtcagctgtagcttgttcaaatggagaaggttcagtttgcttaatagacagggaaatacgatgtctgtcattgtcgataccaatgaccttaaccttaacatcttgaccaacctttaaaacatcgcttggcttgtcaacatgcttgtaagaaatttctgaaatatgaactaaaccgtcaacaccaccaacatcgatgaatgcaccgaagttagtcaaacgtgaaaccttaccttcaacaacgtcaccaacaactaattgtgatgcaaccttgtcaaatgcttcttcacgttcttcttcaactaaatccttgtgtgaaaggattaagcggttcttgttaggatcaatttcggtaatcttaagtttcatagtcttaccaatataaggcttaagatctgaaacgtaacggtttgaaattaatgaggctggtaagaaaccacgtgtaccaacatcaacaattaaaccaccacgaactgatgaagttacagtaccttcgacagcatttccgtcttcgaagtctttttgtaacttgtcgtaggcttctctttcctttaagcgggtaactgagaagaagaattcaccattttccttgtcgccaccggctcttcttaatactaaggccttaaacttgtcaccaggcttaactaaatcacgtaagtctgcgttacggtctgaagtgtattcacgacgagtaatgacaccttcaacaccagcgttttcaacaccaacatcgatttggccgtcttcaatgtctaatacttcgacatcgacaatatctccgacctcaactccttgcatttgctttaatgcgtctaaaaattgattactgttttctgacatatgtacctcccaatatcatgtcccattttataggaaaccgagatatttttctactattttgtgctattttttctaatttttttgttttttttcgatttgagctaaaattgcctctacaacttcgtcaatcgacatgtttgtggtgtcaatttcaattgcatcatctgccttttttagcggtgaaattttgcggtgagaatctttataatctcttgctgcaatatctttttcaatttcatcaactgtttggtcagatttaataccacgctctttaaaatctaataaacgacgttcagcacgtgatcttgctgaagcaactaaaaagatcttaacttcagcgttaggtaaaacagtcgtaccaatatcgcgaccatccataatgacatttgtcttgcctgccatttcacgttgcagacttaccattttttctcgtactttcggcaaagcggatacttccgaaacattagctgaaatttcaggcgttctaatttctttagaaacgtcctttccagctacatatactttttgctcaccattttcagatttcaattcaattccatcttcatcaatggcattcaagatacccgcttcatcaccataatctaagttatgattacgagcaatcactgtacatgcacgatacattgcccctgtgtctatatagacaaaggataatttacttgcaatgattttagcaactgtacttttacctgctgatgcaggaccatctactgctacttgcattctaataaaaaagagatcttatcatcgaccccttttatcctttctgaaagattatttcaacttaagtgtctgacctgcttcaatatttgaagagtctttaagattatttaatctggctaattcatcaacagtcaagccattcttttctgcaatttcatttaaagtatctccactttggactaaataagtcttaggagtagcagaactactagatgagcttgaactagccttttcagactttttcttgctaaaagaagatgatgaggttttcttagtcttaacagacttggatgatttagaagaaaccttcttaactgtttgaacttcttcagctttttctgaatggcttgaagccaaacgatgaacaactgggataagtgcaattaaaataaccgctaaaattataataactgctatccaacgtgctgatccactaggctgactatcttgtgagcttcgcttttcagtaggtcgttcatagtgctgatatggcccggttgactttttatccatcaaaaattcctccattcacttaacggattaattttagcatattttaggatgctttgaatatgaaaaatcccatcaacttaaaaaattgatgggatgataacttaattcaaattaaatctcttacgaacgaatggcttaattgttttcaaggtagcttcaaacaataagtaaacagccacagcgttaattaatccttttaacaagttaaagggcatgataatactaaaaatgtaggttgacattgatggtaaatgcaataactgacccaagtaaactttctcagtaaagcttaacaaggcactatagctattaatagtaggcaagtttggtaccgctgttactgcgtaaataggagtcaaaacggaggcattagccaatgacatcactgctgccattgcgataatcccaattaccaaaccacaaattggtttaactctgcccatcattgtcttgcggttatccgcactcacatttttacttaataaataaaatggaactgcaaatgacattgaagctaagaatgctgctagatttccaacaaggcttggtaatgcaaaaccactaaaaattaaactaagcaacattcgaattaaagcaataataactcccggtacaatgccaaaaataaacattccaattgtaataatgacatctgaaaaatcaaactttaagaaggcaactccaggcatgattggaaattcaaatttcataactacaaaagcaatacagccaattaaagcatatgcaatcacattagttaaactactattcttggatttagcttgatccataacttactttccttttccaaaacaaaaggtctattgcttcagcaacagaccttaaaaagtgtagtaagtttttttagcctgtcttcttccatctagactttaactatcggtatctaacgattcaaccactgacgtgggtcgcggactttcaccgccggtcgggactttcaccctgccctgaagacaataaccttgaatatttaattacagttataatttagttcaattgcattaatttgtcaacttcatgcttcgataattcccgatattgccctgatgtaagcgaatccagagttaaaaaggcatatttttcacgagcaagcttatcaactaagtgacctactgctttaaacattcgcttaacttgatgataatgtccctcatgaattgtaatttggacaatttgtgtgtctttcttatgatcagttttcaatactttgaccttggcaggcgcagccttaaaatgatccaactttactccttgagtcaaggttttaatttcatcaggagttaaaatccctttaatcttggctacatagaccttagccacttcatttttagggtgcatcaataaatttgctaatttgccatcgttagtcattagcaataaacctgacgtatcataatctaatcttcctactggatacaaacgatatggtaaatcttcgaaataatcaactacagtttttctaccacgatcgtcttctgcagtcgaaacaacgccacgaggcttataaaacaaatacgtgtgtaggctttcccgctcaattggctcatcatcgactgtaatattactaaaagtatcgactttagtacctagcttagtaacaacatgcccatctactttaactcgaccggctacaatcattttttcagcttttcttcttgaagcgattcctgcttccgcaattactttttgtaatcgttctgccattttctatccctctttttctaaatgtttgtctgcgctaccttttgaatcgaataagtcaatctcctcaccatcagttgtatcctcaaagtcttcgattaacggtaaatcagccaaactttgataattaaaatattgtaaaaaataatcagttgtaacatacaacttaggatgacctggagcatcttttttgccgtcttgtttaattaatcctcgccaaatcaatgtctgtaaagctcctgatgaatttactccacgaatatcatcaatttctattctagtaattggttgtcgataagcaataattgagagaatttcaagtgctgattgactcaaattcttagttaaatctttttgaaaatacttttcaattatcttagctgtctgttgactagttgtcatcttataagtatttgcaatatgaattatttgcattcccgagtctggatcagccttcattttttgctgcaaacgagtgactaactgacctagctcttcaccatcaacttcaagtagttcaattagattttgctcctcaagcccattgtcacctgcgacatacaaaagagcttctaaatttgctagtttacttgccattcgtatcaattctttctaaatttaaatcaccgaattcacgtgcttgtgtaatctgaattaattgttttttacacaattctagtgtcgctaaaaataagccaataacatctgagatattctgcattttgtccgcgcaagcaaagaaactaacttgcctttttcgtttcaattgtccatgcaaaaaatccatcatctcattgatcggcgtttctgctactctaattgaagcggtatctggttgctgcaacttcaaacgatgtaagaccatcgtaaaagtcgtcgctaattcttgtgcagttatctgacccttaggcagcggttgaactttagcagtggttgatacactagcttctttagcaactgtaatcggtacttcttcattacgttctttaaaataagcagatattttcttaaacacagaatattgtaccaattgttgcactaattcgtctcttggatcttcatcaggttgaatatcatctacaaaatcgttttgaggcaacaaatactgtgatttaattcgcaataaagttgatgacatgacaaaatactcgcctgcaatttgtaaatttaagctttgcatttggcgcaagtattctaaatattgactagttatttgggcaattgggatatcataaatatcaattttttgcgattggatcaaatgcagtaataaatcaagtggtccttcaaaattcggtaattctaaagttaagttacttttgtccattatcttcttctatcgtttttaataaatttgtatattctggtacagcagttattcgtttatctggatattcgtgctttagttcatcaacaattttccgttcataactaatctcacgaaaaccaggagctaaagacaaatatctaataattacaaactgattagatacttgggttcctattacgcccaccatattattttgactattacgataaagatacaaaataaagtcattttcatcctgattaagcgtgatttcttcttttaagttttcgatatttttaaaatcaggtaaataggatagtaatcccattgctatcttctcataatcttttttatattgtattagcatttaatcacctaaagacgaggatgtgtcttctgataaacatttaaaatttgcttttgtgataaattggtatagatctgtgtcgtgctaatatcagaatgtcctaatatttcttgcactactcgcaaatctgcgccgttttctagcaaatgtgttgcaaacgtatgacgtaaagtgtgtggcgtgacatctttagtaattgccgccatttgacaatactttttgatcatctgccaaatagcctgtcgtgtaatcttttttcctcgattatttaaaaaaatatgttcatcgcttttccctacttgtaaaattagcggatcacgaacttcattttcatatttttttatccaatcaagagcaacaggactaattggaatcaatcgttctttttcgcctttaccaagaacccgaactaagcctaaatcgtcatgtaaatcctgcaactccaaattaattaattcgcttactctcattcccgtggcatataatgtctctaagatagcacgatcacgtatacctaactttcgtttagtatttggctgctcaagtagcctattcatttcagcttgagagagagctgtcggcaaacgacgttcttttttaggcaaatcgatttccaacattggatttaacttttgaatattttgccgagctaaccattgataaaatttacgcatgctagaaataagtcgactaattgagctggttgctttgttcaaatcacgctgccgagctaaaaacgcatccacatcgcttgcttcagttggccatgaagccataccttcattttctacaaaagtttgaaattcttctaaatcttgacgataagcattaattgtattatcacttaatcctcgttcaacttgactatagcgtaaataatcatcaatttgatcttttaaattaatcttctccattatcgttctcttctggatccttaattaaagtaatcgtacctgctgttttatcttcttcaattaatccagccttgagcaaatgaccgaccgcacgtttaaaagctgattttgaaataccaaagtatgatttaatttcttgtgcacttgatttgtcatagaaaggtagagtcttggtttctcttctccgcaaactcatcaaaatcatttgcgcatcatcatcaatttcttcaaaagcacgaggcaaagcactcaaattcaaacgtccatattgactgacaccgactactctacccttgaattgctcacctagtctcataggacgtggcatctgcgattcatgtacaaagccaagataataatcactagttaaaacaaatgctcctatctctcgtgtaacataaaccgttgcaaagacattttcattattcattccacgtggaaagttagcagctaattggtcaaaaatattttcatctgctagcttagcccaaatacgatctttttcgtcagtttctaatcttactaaaagtcgatcatcacgtcgaggccatctttctttttctctaggaagatcatccattgataaaacaacgtctttatcaggtagacctacatcaacaaagacgcctaagcctggacgtacctcggttacttttccccaaccatattgatcgggttgcgcgaatggcaaaaattgtgtcatttctcgatcatgacttttattatcataaataaaaccttcgacttcatctccaattttaggaatatcatcttgcgtaatctcgatcttcttcaattcataagtcagtccatcaatttgaacataataagctttatcgttttcgtcagtaatttttcctttacgaactgttccaagcatttaaaaatctcctactttacatattcttacatataagtataagagatttttatgcaaaataaaatagccagcacttaagctggctattttttgattagctaatctatctaaattatattcttaaaattaaaggtttgaaattttgccttggtagatagcaccacgacgagcgtcaacagtaatagttgaaccatcagaaatcttgtcagtagcgtcagtagcaccaacaacaactgggatacctaatgataaaccgataactgcggcatgtgaagttaaacctgaagcttcaacaactaagcctgaagccttcttgatagctgggttgtagtctgggtcagtagtcttagcaactaagatgtcgccttccttaaccttgctatttgcttcttcagctgagttagctacaacagccttgccgataactgaaccgttaccaacacctaagccttgaactaacttgttaccgatgatttgtaacttcattaagttagttgtacctgagtcaccaagtggagtacctgcaacgataattacaaggtcgccatcctttacgtaacccttttccttagctaccttagcagccatttcaaacatgtcatcagttgacttaggcttttcagtcaatactggttgtacaccccaaacgatacccaatgagtgttgaaccttttcgtcaaaggtcatagcaataatgtcagcattgggacggtacttagaaatcatacgtgcagtgtaacctgagttagttgcagtaatgatagtcttaacacctaattcttgagcagtacgtacaactgattcaccgatagcttcagttacgtttgaacccttgtaagcttcgaatctttgaagagctaaagtattacgcttaagcatttgcttttcagtacgttcgtcaatttcagccatagccttaacagccttaactgggtaaagaccatttgctgattcacctgaaagcatagttgcgtcagtaccatcaagaacagcgttagcaacgtctgaaacttcggcacgagttggacgtgggttttcttgcattgagtcaagcatttgagtagcagtaataactggcttaccaagtgcgttagccttgcggattaggctcttttgtacaaatggaacttccataaatggaatttcaacacccatgtcaccacgagcaaccattaaaccatctgaaacttgcaaaatttcgtctgcgttgtcgataccttcttgagattcaatctttgggaagatcttaacgtagtctgcacctgcttcttcacaaagcttacggatgtctaagatatcttgagccttacgtgcaaatgaagcagtaatgaagttaataccatagttcaaaccaaacttaatgtcatcagtatccttttcagtaatacctggaaggcgaatttcaacaccaggagcgttaacacccttctttgaaccgattacaccagtgttttgagcttcacaaacaagttctctctttgagtcgtccttttccttgatcaaaaggtcaaccaaaccatcatcgattaatacgtgaccaccaacgtgggtatcatcgtataaaccgtcgtaggtaacgtggatcatgtccttgttacccttcttagtggcatccattgatacacggatcatgtcaccagtattaatagtgaacttgccaccttcttgttcagtggttctgatttcagcacccttagtgtcaaggtcgataccaagaagtaaaccagtatccttttccacttgacgaaccatcttcatacgagcaaggtgttctgggtggtcaccgtgtgagaagttgaaacggaatacgtttgcaccagccttagctaaagcagtaatagtttcaatatcgtttgaagctggccctaaagtactaacaatcttagttttcttcattattaaaaaaatcctctccaaaaatcaactaaattaatatttagtcatttcttcatttacatccaataacgcataatcaccttggtgtttaccgtcaaacaaatcaagaatgtcgtgggtattaagttcaccattctccatgccgacagctaaaccgcccttcccatcgagaagtaacttaacagcataattacccatcttagtagcattaactctatctgtaacagtaggtgagccaccacgttgcatatgcgcaaggacattagcacgagcatcaaagtcaccatatttaaggagttcgtccttaaacttatcagcagccataacgccttctgctaaaacaatgataccatgatctttgccatctgcaaaaccacgagtaagagtttctgcaatttccttaacatcgtatgaacgttcaggaattacaattgcgtctgctccacttgctacaccgacacgcatagcgatatcaccacattcacgacccattacattaacaacgaatacgcggtggtgactgcttgcagtatcacgaattttatcgatagcatccatagcagtacgacaagcagaatcaaagccgatcgtgtagtcagtataaggaatatcattatcgatagttcctggtaaaccaactgagtttacgccgtggcgagtcaaggctaaagcaccatggtatgaaccgtcaccgccaattacgataaccgcatcaataccgtgtttctttaattgctcaacacccttttgttgcacttcttcttgtgcaaattcagggaaacgagcactgtacaagaaagtaccgccttcactaatcttgtggtcaacattttccgtggtaagcggaacaaagtcacctgcaaccaaaccagcgaaaccataacgaattccaaagacttcaagcccatgatggatagcagtcttcgtcacagctctaattgctgcattcataccaggggcgtctccgccactagttaaaataccaatccgtttcatgaattcacctcatcatgattattttgtgtaatttctcacatcacataaatattaacattttttaggcaaaaaagctcacaaaaattgggctaatttatgctttctttccgtatttaagtttgttagcacttacatccatcgtcaaagatagctttgtaatttgaactttattctttaaaattaacttttcgcaaattggttaagaaatactgttttttattttggtcaaatcgatcaccttgaaccttgactcctagtaaataaatatctccttcttttaaaatagagccaaatttttcataagccggtggaaaaataataatttcttgttcgctagatgtatcagcaaaactagcaaaagccattgtttttccatttttggtcctaatttgctttaacttcattaatttacccacgctaataccactatcatttaactgaaattgattcaatggtctagcgttaaatttttgtgcatatttttgtacagctattagaggagtagttgttgtagtaaagcctaaagctttctcttccatttctgctttttgggcagcagtcggtggctcagcaggcttaagtggtgcatcccccagaatctcagataaagacatattttgtcccgttaattgcacattagcaattacatctttgcagttaagcaataactcattgcgattatcttcgattgagtcaaatgctccagccataatcaatgcttcaattgcgtctacttgtaagaacttagcatcgattctacgcaaaaaattattaaaagacttatacggtttagtattggcagctatttccttagcaaaatcaagacgtaatcctttaattgcttttaaaccaactaaaatcttgccatcttgtaaagtatagtctaattggctgtgattgatatcaggcggcaaaatacgaactccagcttcctgagcttgcatcgaatagctttgcactttagcagacgttgatgaattgagcatcgctgtgtaaaatgcagcaggataatgaaccttcaaataagctagccaaaaggcaatcttggtatatgccaccgcgtgtgaacggttaaaaccatagttagcaaattgctctatataatgataaactcgctcacctacttctttaggatgaccttttttgaccgtaccagcaataaattttccacgttcttgctcaatgacattctgattctttttagacatcgcacgtcgtaaaatatcggcttcacccaatgaaaatcctgccaggatttgagctgtttgcatgacttgttcctgataaaccaaaattccataagttgattgtaaaatttgctttaaactgggatcaggataatgcacagtagccgtaccattttttcttgcaacaaatgcgtcaatattttgcattggacctggacggtataaagcgttcaccgctactaggtcctcaaaattgtcgggatgcaatttacgcaaaacaccacgaatcccaccagattcaaattggaagactgcatctgttttaccttgttgaaacagttccattgttttgggatcatttaacggaattgtattaggatctagctttacaccttgctgccgcactaaagctaaaatattgcctaaaactgtcaaattgcgcaatcccaaaaagtcgatctttagcaaacctaatgattcaacatattttttggtttgctgagttacaggaatgccgaaaggaccagcctgcaatcccgaaatgccagcaatcgaatcatcactaatcaccaatccagccgcatgaatagaataatgccttggcaatccctcaagtcctaaagcagtcttaaataacaatttattctcaggcgttgcatcaaccaataatcttagttctctagactcttgatatgctttttttaatcccattttatctttagagtacgggattgcgtgagtccacttagtgatttctggtcctgttaagccaaaaacccggccaacgtctcttaatacttgtttagcagccattgtaccaaaagtcaaaatttgagcagcatgatccatgccatacttttgatacatatacttaattactgtattccgttgaatatcaggaatgtccagatcaatatcaggcatctcatgacgagccggatttaaaaaacgctcaaacagtaaattatattggatgggatcaacttcagtgatacgcaaagagtatgaaaccagtgaaccacaagctgaaccacgtcctggaccagtagtaatttttactcggtgacaatagttaattacatcccatacaatcaaaaaataatcatcgaaccccatctgattgatgactcgtaattcataatttaatcttttctgatactcggctggaatacttttttgaccaaagcgcgcttgtaaaccagtttgagccaaataacgcaaatattcttctgaagtcggaaacttatcttgatgatatttaggtaagaccggtttttgaaagatcacttcagcattacatttctgagcaattttccaagtattattaattgcatcatccaagtcatattgatgatagcgttctaaaacattttgtgcagaatctaaataatgcgaaccagcttgcttagctagtggcaatatatcttgcaatttatctcccttagcaatcgcacgcaaagttttttgtaaaaattgctcacgtggccgtaaatattgactatcttccactgcaactaaagataattcaaattgcttagctaatccacggacataatcaatgtaatctatacttgcttttgaagcatatacacccaaataaagatcaaacgttaacttctttagttggcgaacataatcactgcctaatgcctgatttgtatcatgcagcgccattaattcactttttagattagctggtacgataatcaacaaatcatctaaatatttggttaattcattcagcgttaagaccttatcgttttgcccattttccgttaacaaatttaccgcgctagaaagtcgcaataaattatgatagcccttatttgttttggcaaaaactagcaaatcatatttttgggtgctatcaaccaaaccatttaaacgcagttgcatcccaagaagtggtttaattcccgcctttttagccaactcataaaaattgaccaaaccataagtcacgttcacgtcggctaaaccaaccacaggatagcccttctctttagcgtcttttatcaaatcacttaccttggttggactacttaaaagcgtaaaggagcttatgttttgaagtgctgctacttgcataaattaaccacctttcgtcattacaaacattaaattaagtataccaaattgaaccaatcaggtttgaatttgcgcttcatttttgataaaatcttacacgaaagaaggaatcattatgggtcgttatatcatcacaactgtatggagcgtaatctacatgttagttgtaggctttattgctggtcctttaacccgaagtgcttcattcaacggcacagatttaagaaattgtgtaatcgttgggatcatttttggtattcttttctcagcaattattgcgactattactgctcgttcacacaaagataatagtaaatacagtaagttaaaataattattcaatctattcaaaaaagacgtgagatgtttttattctcacgtctttttcgtttggtttagtaaaacttataattcttttttgtatctacttcgactggtccatgagtcaaatattcactaaacatttgtacatagtccttatccaaagtggtttcaattttgtccatactatattcaggataaaatcccccacccatagcacgatagttgttaactgctaaatgataaatctgatcatctttgattggcttaccgtgcaaagttagtttagtcagccgttcacctactggtctggataaatccgcttcatattcgactggataaaagacgtcaaaatgatacaacattggcttaggcttaatccatcgatcaataaagccaatgtttcctgcttcatctttcttcaaaaagccagcagagtgctcaataatatgacgtaattctttaccagtcagcttcacacgacacaactgattagcatacggataatttaacaaaacatctctcatagtaatggtcttatcaaatcccttagcagtctcactcatcactgcagttgccgaaacatcagctttagtaaaccataattgcatttgctggattaaattaataaatggcgcgccttctattctgcctttcattgcattttcaattcgagcaggtttatctaaatgtgcaattggttgatctagccatttttgtgttcttttatccaagtcagatacaatatcaacaattacaggatcaggatcataatctttagtgtcaatcaacttagtggacattgatttgattttcttagtatcatcatcaatatcaagaaccacttcagctacagcttcaccgcgataacctggttgaacaatagcagtatcgcgtgtaaccaaatttaagcgccgatgctggtgacctgtcaataggacatcaacttctggaattttggttaaaatctgataaccttcattttcaccacgattaggttcagtcgccttaccagtttcaggatcactttcaaagccaccatgatacatcacagctaaaatatcaacctgagggcgtaatattttggcataatgcttaattttttcgtaagcagaggcaaactttaagccttttacattttctttaggttcccaatgtgggatatattgcgttgtaatccccaataaaccaatctttaagccatttctcttgataatagtgtattctctaccaaaaaatggaacttctgtttctgcatccagtacattatcattaatgattggtgcctcattgttatcaacatagtagcttaaataatctaatccaaagttaaaatcatggttacctaaacagcgagcatcataccccactgcattataagcttgcgtaaaaatacgtaaatcactataatcgccagttgaatgagcataggaagcaagtggtgagccttgcaaacaatcacctgcatcggtaactacaacattgttatcaccatactttttcttttcagatttaataactgagctaactctactcaaactaaaaggagcatgatagtcggttttattttggtaatcagttggcaataaaaatccatgtgtatcactagaatgtaaaaatactaacttcattatttctttttcctttttctaggcataaaaaaagacaccatatcaaaggtgtcctttaactagttattgctgttgtcgttgttatttacaacttgacgacccttgtaataaccctttggtgaaacacggtggcttaagcggtattcaccagtagttgcatcatagtgcattgctggaacactcaacttaatgtgaccacgacgtgaacgtttcttttgtttagaagtatgtcttgcaggaactgccatttaatttgatctcctttattgtagtcttaagcttcagggtcatataaccccgaatcactcacgtagttcaatcatactattcaattgctaataaatcaagatttattctattttcttctcttttttattgaagaaagtgaccttgtgatccgttttttccttagtatctcgtccaaagaaccaagcaataatcatcccgataatcaccattaccactaacacaacaattagtggtaacctcaccttaaaaaagccaaaattaattgcgacaggtgatgtatttaaaacaacaaaaattactgcaattaaagccacaactgatccaataattaaatttctttgtttttccatctttttttactttctagaagcaaactttaaggaaatcttatcaccaatcgatggaaatagattatacaatttagccgctacagctaaactaagtggtaaatttaattcacgtttatcactgccaaagaagtgaactacttgccaagcaacatcatctggatccaacataaattcttgaacatttttgacataatttccagtcttatctgctacattaaggaaattagtataaactggtcctgggtttacagtcattaccttgacaccaaatggctttaattctagccgtaagacatttgaaaattgaattacggcagccttagatgaactgtaagcggctgacttggtagttggtaccttgccagcaattgagccaaaattaataatttgaccagtcttttgttccatcatgaccctacctactaaacgagtaaagtacatcaaacctaaaacattaacttggaacatattggtaacgtcttgcattttttggtccataaattcttcgaatttaccaaaaccagcacaattaactaaaaagtcaatgtgttttacttgtttagtaattgcattaaaggtttgttcaatttcttccggcttacccatatctgttggaaaaacatatgcttcagcaccggatagttctttagcttctgctgcaatttcatctaattggtcctttcttctagcaattaaaattacagtagcaccacgaccagcactttcaagggcaatggaacgtccaatcccacttgaagcacctgtaattacaacaactttatttcttaatgagtctttcatttttctgagcctttcattggaatattaatctgatcaaaatcattaactaatactgtattagaaaatacttttttagcctgtttttcgagttttttccctttagcacccatataacgagcagaaatatgatttagacataataatttaacattatctttccgagcaattttggctgcttcaaccgaagtagaatgataataatcatgcgccaatttttgttcatcccctgcaaaagttgattcatggactaaaacatctgcatctttagccaaacgagcaatacttggcgtggaacgtgtgtcatagatgaccgtcacaattcttcccggtttagtaggtcctaagaaatttttaccatccaaaacagtaccatcagctaaagttactttttcgccattttttaatttccccaaaagtggcccattaggaacattatactgtgctaacttgtcaattaataattcgcctggatgtgaagcctccactactctaaaaccaaaactaggtatccggtggtctagttgctccgtatacactcgaaagcccttatcctcacagattaaccctgatttagctaattcaacaaaccttatagaatatgaaattttagtccgagataccttaagagctgttctaacaaattcttcaataccactgggaccataaatagtaataggaccaacatcaccttgaaaagaacgagttgacaataaccctggtaacccaaaaatgtgatcaccgtgattatgtgatataaaaattttggtaacttttcgtaatttaatatttgttcttaaaatttgatgctgagttgcttcacctacgtcaaaaagccagatttcattcaattcatccagcaacttaagtgcaacactagaaacattgcgttgctttgaaggttgcccagcaccagtacctaaaaattgtaattccatgaaaatcctattctaatctaaaattttgaatgcttaacaattgttttggtaactaatgcactatagtattttgagccctttaaattagggtgagtatgatcaccgtagaaccagtcaggatgattcttcgagtatgaataccaatcaattattataagattatgataccgttttgcaccttgatttagcaaattattcactgaattttgccaatctctagttggaacgtgaacattaatccagaaaacttttctcttaggtccagcctgatgcattattcgatcaagatcttccattgagaaaggtccattagttcctaaccctattaagatattatctgctaaaactccttgactttgataactatctaataagccaaaagcaacattcaattgtcttgaaacagcagcatcaattaacgctttaggcattaatcgttttaaatcgttgctcgaaccggccattaccgagtcgccaatcgcagttacttgaacatgttgagcaaattgcaaatctaactgggaaataccatatttaacaaaggatttgttaataggatgctttttagtttgaagctcagcttcacgaataattttagattttttttcttttttctttttttctttttttaacttttcaattaatttagcattatccgttttttgttttttagaattctgattaattcgctgtgctaattggcttttattaaagtcttctgcttttactcctggtgaaatagcaatagctgctgatcctaagattaaaatcaaagctgctaaggctgcttgacctttcttaaagtaatcttttgtttcaaaattaaaaattcgagcaaaatattgcttcgttttatcccaggtaatcctacccattggtctttcaatcaaacgataagtaatttctgtaatcactaaaattaaaatcacttcaataaggtgatacagcattggattatcaccaatatttaccttatcttcaaaaaagatcattactggaaattgatacagatagatgccataacttcgcgatccaatccaatcaaataacctattagttaggatttgattccaatgactaccaggatgagcaattaccgctactaaaatacatacatctaaagtaaataacaacatcccgccagagtaagtaaaggcttgttgtggattcatccacttagagaaaaacattgctaacattaaagcaaatgaagcaaggcccaccaagtccagtatccagcctacttttcgttcaacttgctgatttaaactctctatcggccaaacaactgctaatgctgctcctaatcctaaagaaaagaaacgagtatcagttccataataaattcgattaatatcagcctttaaaaagtataggattgccatttctaatgcagaaacagctgatagaccaactaaaatccagaaaatattttttttctttttaaccaatttaactagtaaataaatgacaattggccaaacaatataaaattggccttcaattgacatcgtccataaattagtaaatggtgattcattagctgcaaaacgctcaaaatagctttgaccattatgaatttgccaaaaattaaatacatttaatagatttgcaagtacaacctgatttaatttagccagtaaatttcgttgaaagataaagatataggctgcacttaaccataaaacagtaattaattgtggatataacttttttattcgactcaaataaaaatgacgattattatatgatcctgttttatcatatgaattaaacatatgatctgtcaccaaatatcctgagagcacgaaaaaaatcggcactcccagatatcctcccataaaggaattaggatccaaatgataaagaattactccgataactgctaaggctctaaggccagaataccccgtaataaacctattttttttcataccctatctctactcttattgtacgaattcaaagacaaacttgccaatagccacatcatcaccattaacagctcctttttcacgtagtgcgtcatcaacacctaaacgcttaagctttcttgctaaacgcataataccgtcttggtgatccaagttggtcatttgaactaatctttctaattgttcacccttaacgataaattcatgttcgccaacttgctcaactgtaaattcattcttttgtggtgcctgatacttatattctttaatcttttgtgctagcttaggttgttcttcagcctgttcttgttcaacttcagttactaagttggcagtatctgacatcaacttatctacgcctttatgagttacacttgagatctcataaataggttcattatttccttctgcttttaatgcttttttaaactcagctagtttttcctcagcaccaggaatatccatttgtgaagctacaatcaattctcgcttctttgataaatctgtttcgtaatttttgagttcttttttaatggtatggtaatcatcaattgcctcacgaccattattaggatccattgaaactagatgtagaattactttggttctttcaacgtgacgtaaaaattgaattcccaagcctacgccttgactagctccttcaattaatcctggcaaatccgccattgaaaagtcacgaccatctggcaagataaccattcccaaattaggagttaaagtcgtgaattgataagcagcaattttgggcttggccttagttgttactgataacagtgttgatttaccaactgacggaaaaccaactaagccgacatcagccaataattttaattctaagcgcaaaacgcgatcttcacctggttcaccattttcagcaatttctggtgcagtattaacactagttgcaaaatggatattaccgcgaccgccgcgaccacctttagcaacgactagttcttggcccttttcagttaaatcaccaatcaattcattagtgtcataatcatatacagtagtaccaactggaacttttaaataaagatccttagctgcacggccatattgtgatttaatacgaccattttcaccactatccgccttaaacttacgccgatagcgaaaatccatcaaagttcttaagccgctgtcagcaacaaaaataatactgccgccacggccaccatcaccaccggctggaccgccattagggacgtatttttcatggcggaaagccaccatgccatcgccgccttttccggcttgtacttcgattttagtttgatcaacaaatgtaggcatgtatatctcttccttccgtcttaatctagcttttaatactataccacagaaatacgcatgatatcgcgttttctcggattacaatgttaattttaccgtttgtgcttgagtaagcgttaatcctgctctacgcaagtcatcaattgaagcttctttaattttcttcaatgaaccaaattcgcgcaataatttgttacgacttttaggaccaattcccttaatcgaatctaaacgactggacaaagcatttttagcatggcgtcttctatgaaaagtaatcgcaaagcggtgcacttcgtcttgaacgcgcgtcattaaataaaagccctctgatttgggattaaggggaatcagtttcaaaggaataccgttgatgggatcgccaaataataaatggtttgttctgtgcttatcatctttaaccatccccgcaactgggatattcaaatttaattcatttcgtaaaacatctaaacaagcatcgacctgaatttgaccaccatccatcaaaatcaaatcaggcattcttttatgctcgcgcaacagtctaccatatcttcggcggacaacttccctcgtgttgcgtacttcgtcgccaccattttgatgttcaacctcaccttttagcttatatttacgataagctgttttttcgggttcaccatctttaaaaacgactaaagcagagactgggtcagcaccttgaatatgggagtgatcaaaactttcaataaagtgtccatatggtaagcctaaagcatcaaaaatttctttttgagcgcctttagtttttcgattacctagttctaataatctaaacttatcatctagctttaacttagcattatccttcgccatgtctagcaatgactttttctgccctcgttgcggtgttctaacaggtaccttcaaaacctcagctaaagtagcattatcaaatccttcaggaatcagaatttctttgggcaaaaccctatttctttgcccataaaattgcacaataaaggaagtgaaagcatcttctggatctgtggcatctgtcaaaggaaacattctggtttctctacgcaataactttgcttgccgtaaaaagaagatttgaacagaaatccaagacttgtcaacgtaataattaaaaatatcacgctgcgtattatcattggaaataattttttgtttttcaaccgtttcttcaatatatttcaattggtcgcgaatttcggctgctcgttcaaattcaagattgctagctgcttgagccattttttcggtcaaactctgcttaacactagcaatatctccattcaaaaagctcttgatctttttaatttgctcttcgtattctttttgtggcacttttttaaagcatgcacctaagcactgccccatatgatagtaaagacaaggtctgccttgataaccatgacagcgccttagtggaaaaactttttgaataaacttcaaagtggcctgggcagcatatacattaggatagggaccaaaatagtagccaccatccttatgaacgatactagttaaccgagtttgcggatcatgttcacgcgtgatttctatgtaaggatatcccgtaccctgctttaattgaacattataataaggttgatacttttttattaatgtaatttcaagtaaaaaagcttccttatcagttgatacagtaatgatgtcataatctcgaatttcacgaactaattcagcacgacgtccaacctgtttactcttaaaatatgagcgaacccgattttttaaatttttagatttaccaacatatataaccgtaccgttaatatctttcatcaaataacagccgggtttttctggtaaaagttttagtttattctcaattaattgtgttgccattatctcatctcactgaaaaaatttgcatttaatagtttaacacagactgtttaagaagatcttaactttgcttatagaaatagctattcggtacaaaagttgatatattaaaagaaataaaatttgaggagaacttttgatgactaatctagtttttgacttaattaaccaatttggctacctagccatcagtttgctaattgcaatcgaaaacatctttccccctattccatccgaagtaattctatcgttcgctggctttgcaacccatcattctcaaatgaatgtcttcggtgtaattattgcttcaacaatcggcgcggtagttggtgcactagttttatattggattggcactttacttaatccagatcgattagaaaagttgttcgatcataagttattcaaactacttggctttaaaaagggtgatgtacaaaaggctatcagatggtttgataaatacggtaccggtgcaatcttctatggtcgctgcatccctgtagttcgtagcttaatttcaattccagctggaatagccaaagttaaattacctaatttccttatttacactagcttaggcagcttactctggaatgctattctagttggtcttggttcctatatgggtgaaaattgggaacaaattgtgttaatttttgaagaatactcattaattattggaggacttattctaattgctttaatatatttttcctgtaaatggtataagcaaaaaattaaagctgattaattcaaacgctctataaaaaatatagagcgttttcttcttttaaaaattaaaaatatcatgtaaaattaatctaatctataataagggaagtttgcgaatgaaatttaatatttttaggaaacaaaatgttgagaactatctcggtaaagacattaagttctccaaaacaatgaacgccgttgatttaatgtctcttggcgtaggagctgtcatcgggaccggtattttcatcttacccggaactgttgcagccacattaactggacctggcgttagtttatcctttgttgttgcagcaattgtttgtgctttagctggaatgtgttatgcagaatttgcttcagcgatcccagtagctggttctgcctattcatatgggaatatcgtttatggcgaatttacaggctggattatcggttgggcactgattttggaatacatgctatctgtagccactgtggcagcaggttggtcatcatacttcagttctttcattgcaccatttggtctaaaaattccacacgctatttctggtcctatgaatcttaacaatggcgtttattttgacttggtttctgttttaatcattttacttatcagtatcctgttgtcacgagggatgaagaactcaattaaaattaatgtcgtagctgtttttattaaaatcgccattattttaatttttatttttgtaggcttacagttcattaaacctaacaactatcatccgttcttgccatatcatttttcaggagtcatcaaaggagcaaccacagtcttctttgcctttcttggctttgatgttgtttcatcatcagccgccgaggttaaaaatcctaagaaaaatatgcccctaggaattattggcactttagctattgcagctgtactttattttggcgtttcaatcgttttaacgggtatggttaattataccaagctaaacgtatctaatcccgttgcttttgcattgcaatatgttcatcaaaactgggtagcagagttattatcatttggtgctatgctaggaatggctaccatgatgctgacaatgatctattcaagctctcgcttaatctatgctatggcacgtgatgggctattgcctagtgcattcagtaaattagataaaaaacataactctcctcaaaatgccttagtcgctgtcactattattattgcagcaggtgcagcattcttctccgttgatcaactagccaatttggtcaactttggtacactttttgcctttactcttgtttcctttggaattctaaaattaagaaaaagaacagatattgttaacgatggctttaaagttcccggatacccatatttgccaatcatttctggtttaatttgtatctttatgatttgccatttaagttcagaagtttacttaatggcagctatttggttaatcatcggtgctgtaatttactttatttatggctaccaccatagtcagcttgatcatgattaacatcagtaaaaattatgtaaagaaaaagacgattcgcatgaatcgtcttttttagctctgtttgaactagttaatttgattaattgcctgaccatctttaaagaaagacaaaacattattcgcagcttctttagacaaattaaatctagcaatgtgagtagctgaaccaacgtgaggcgtcatgatcacattatccatttcaaccaattcaggtcttggatgcggttcgttttcgaaaacatctaaggcggcgcctgcaattgaaccattctttaacgcagcaattaatgcatccccgtcaatcaacgatccacgagcaacattaattaaaaacgctgtgtctttcattttctttaaaaagtctgaattaaccagatgatatgtttcagctgtagcaggagtatgtaaactcacaaaatcagcttcttttgccaaagtatctaagtcaacatatttagcatctaattctgctgcaatttgatcatctacttgatgacgattatgataaataattgtcataccaaatgctttagcgaacctagcaacttgttgaccaattcgacccatacctacaattcctaaggtctttccttcaatggagtacccttggttgtcgtactcatcggcatttaaaaagacgccttcacgcaaagcatcgtcataataatgcaatctacgagctgatgccataatcattgtccaggcaagttccgccgttggacgcaacacactcttagggcaatttgaaacaactattcctttttctttagcgtattcaacatcaacgtgatcaaagccaacgccataagttgaaattatttttaaatttttcgcagcatcaatcatttctcgatcaaaagccatctttgctacgatcacaccatcatattctgcaatatgatcaagcacccactcacgatcatcttctggtcgatgtcctactggaccgatatcaacttgacaaatattttttaaatcagttaaggcctcatctcttaagccacctaaaactaaaacttttgctttattcattatttttagacctctattcaattttcatcttaaagtaaaaataccactatttgaaagagaaaacatctactttaatattttattgattgcaactgcaacaccgtcgtggtcacaatcagccgtaacttcgtcagcatgttgctttgtatattcaacagcatttcccattgcgatacctaatccagcataagttaacatcggcatgtcgtttgcttgatcgcctagggccatcacattacttcgatctatttttaagtagtcacatagtcttttcaggccagtccccttatcgacaccggcagcggttgcttcataataaaaaggctcagtctttgaaaatacaactcgatctttcatcatttcaaataaaggagattctattttatcatctaaatagtctggatcatcaacatacatacatttgatgattggtatctgcttcatttcttcttgtgtacgatatgagacttctaattttacgacccgtgaattataaattgtataatgtcccaaatcacggctagctgtataaattcgatctaacgatacgctatgaaaatgtaagtttagctttcgcgcaattgtctctaaatctacataatcttcatattttagcccctgtttgaaaataacctgccccgcggttgattctacaactgcaccattaaaactaactacatactgattttcttggccattaagccctaattcatctaaataacgttgagtacctgacaaaggccgacctgtgcaaattacgatttgcttgccttgtttttgagcagtcaaaattgcttttttaactgctggtgtaatctccttcttagaattaactaaggttccatcaatatctatcgcgattagcttaatttcttccattaccttttcccttaaaacaaagaaagcaccgcttatgcgatgctcctattaaacagccatggtctgcgtattttcttttaacttgaccaaatcagccatatcatcagcactgatttcaaaatcgatgttcaagttttcctgcatttctttaacattatcactcttcggcaaaacaatacaacctagctgtaagtcaaatgctaacattaattgagctggactaacatgatacttttcagcgtaagtcctgattcttggatcctttaacaaacgaccatgtgcaagtggagaatatgctttaatctgaattcctaaatttttacattatttcatcaaatcagttggcacatttcctatatgaacttcgatttgattaactactggcttaattgagctgttattaacaatgttagctacgtcttcttgtaaaaaatttgaaacaccaattgatctaactttaccggctttaagtgcttcttccattgctctccagttttccagattgccttcaaagtgacgatcattaattctattcacttcaatccaaggttgtggtgaatgaattaacaacatatcaatatattccaaactaaatcgatctaaagcgtcatcaattgcttttttgtaccttcatagtctttaatcgaagttggtaatttagttgttaaaaaatatcactactctcaacatcagagttccaaataccttttcccacaccactttcattgccatagtctttagcagtgtcgaaagcgcggtaaccaacattaatcgcttgacgaattacttttcgtacatcatcgttattaattagccaagttcctagttgaattcgaggaacctctactccgttattgagcattaaagttttatcagagtacatatatacacctctacattttactaatatgtctctgtttcttaattcctgtatttatatagctaataacaattattaaacaataattgtttttttcagccatctgttaatagcatacaacaaaattgttgcaaatcctatacatacattttattttttgtggttctgttatattttctaattaaaatagtagcatcaatcaatgctgctaggtttataaagattatcaaataatttattttattattctatacaaaattaatattttcgtataaaaaaagaaagggctgatgatgtcctatcaactctttctcttcagtctcttaattcccaacacctataataccagcatttatcatttaaacaaggataaaaaacatcttttacttactaaatattatttttagttttcacattatagttttcatcacatttttaaaaagtctagatgttatattacaaaatgattacaagagcaatataaatcatatagttcactattagctatatgcaaatactatattttttgagcaataagctgcaacaatttttgagcaatctttcgcttactcattttaggccatttcttagttgacttatttttttgtaaaatcgttacctggtcttcatcattgccaaaaacatttttagaaacgtcatttgctacaatcatatcggcaccttttgaagatagcttttttgcagcattttgtagcaaattattcgtttctgccgcaaagccgacaactatctgccctcgctgcttgtggctagcaacttcgcgtaaaatatctgtcgttttaactaaagttagagtcaaagtttgttgatcagcttgcttttttaatttatgatctgcaacttgtttcatgcgccaatccgctactgcagcagccataattaaaacgttactatgcttaaattcttttttgactgcaactaacatttcttcgctactagaaacatgaattaatgtaatcctaggattttgtggcaaaggcatacttacattaccatatattagctttactttcgctcccatcgctgctgcttctgtagctaaggaaatgcccattttcccactagagcggttaccaataaagcggacgggatcgattgcttcttcagtaccaccagcagtaataacaatattttttccttgcaaaacgttctgttgttcagtgaaatttttgatccacgccacaattgctcctggctctggcattcgtcctttagcagcatagccttctgccagcatccctactgcaggctccattatttctacaccatgttctttcagaaaagctatatttcgctgtgtagctggattattccacatttggtcattcatggctggtacaaccaatttaggtgcacttgtagctaaaattgtagtgctagctgcatcgtcagcaattcccgttgccattttagcaataaaatttgcagtcgctggtaaaaccagagctaactctgtccaacgcgctagatgaacatgtggtatgctagcctcattttccttgctccataaatcatccaaaacaggatactttgttaaagctgccagtgtattagtagttacaaaatgctctgcatttttagtcattactatttgaacttgatgacccgctttttctaaatcgcggataacgttaactgccttataatcagcgattccacctgtcatataaattgttattcgactcattttaccattcctcgtcatctaaacttatttttattttatcattgtccacttaaatagtagacccggatttaaaattgaagtgcaacactaagtgttaaacaaaaaggccatgaagacctaaacttgaagtgacgaaaaatcaagaaaggaagatctttatgaccaattcaaattctagcatttctaagcactatcatcaattaaccagcgtacaacgtggacaaattcaagcaatgctggattccggcataacttcccgtactgttatcgctcaagaagtcggctgccataagtcgacaatcagtcgcgaaatcaaacgcggaagtgtcctgcaaagagacagcagctatttattgtatgagcactattacgctgatactgcacagatttattatgagaagcgtcgcaaaaactgctatcagcgcaatccattgaagcattatgctgtctttttgagaatgctctccagacgctttaaagctaaatttgatgccaccagcatcgatgaattcgttggtgaattcaaaaggactatgccaggctacccttgtcccagcacaccaactgtctatcgctatattgatcagggcttgctggacataagcaatattgatctgcctatgaagctcaaaagacgcaggaacaagcgtcatcacggccatagcggtcatgctttgcacaagaagcatcttggcaattccattgaacagcgtcctaaagagattgaagacagaaaaacgccgctgcactgggaaggagatctggttaaaggcgtcagacgcaagaatcagcctgctttaatgactttgaccgaaagaaccacacgctttgaagtagttatcaagattcctgactatcgggcaagcacatgccaaaggctgcttcaaaatgagattgacagacatcctgcctggtttaaatcgatcacgtttgacaatggctctgagtttgcggatatgaccgagatcaaaggctgccagatctacttcgcccacccatattctccatgggaaagaggcaccaatgagaactgcaatggacttctgcgtcaattcttccctaaaggcaaaagcatgaaagataagtcagctgcttatgttcaacaggcaactgatgccattaaccgcaaacatcgtcgaatccttcaatatcacacagcagaagaactcttcaagcaatatatttcctcatagcctaactgttgcacttaatttgacaattcaggcttaaatagtagaatattgtgttgggagttatatttggaggaaaaattgaaaaatatgcaaaaactacttttactaactatattcttacttagcttatcggcctgcactaaaccacaatcatcctctgtaccacgtgataaaagtgccactacaatcaagattgttgataggaagcttgagttgcatcagcccactaaaaggccacttcaacctttaaatggaattttgcctcattggctgcaaatgccagataaatctcagcctaagccagcaatttatactaatttgaatactgttcttaaaaacaaatagggaaatgattagtttcatcttccctatttttgagactgtaaaatagtttgtgtaaggatgaatgattccttaaatttatttctttaaacattagaaaaaggagttcctttctcgtatgattggtttgaacaaaaaaacacatacagaaagaagaactccttcatgaatgattttaccaaagattttgctcaagctctattcaatccagacaaaataaataatttattgcgcaaagagctacaacaggctgttaataacttgttagaagctgaattgactgcctttctgggctatgatccctatgccagaaatggctggaatactggcaactctagaaatggtgcttatttccgcaaagttgatacgcaatttggcccaattgaagtgcaagtgcctcgggatcgcaacggtcaatttcatcagcacacgctgcctgactacaagcagcactcggatatcttgtaaagcatgattatcaagctttactccaagggcgtgaccaccagggaaatagccgatctaattgaaaagatgtatggcagccattacagtccagctcaggtatcaaatatttccaagcagatgattccaaaggttgaggcttatcacaagcgcaagctaagcgacaagtttttctgcatctatttggatgcaacataccttcctttgcatcgagaaacatttgagcgtgaagcagtctatattgccattggcatcaagcctaatgggcacaaggaggtcattgactactgcattgcgcctagcgagaacattgaagtctggacagatatgcttcaaaacatgaaatcccgaggcttaaagcaagttgagctttttctttctgatggtgttgttggcatgaaaacagccttgaccaggacttatcctaaagctcattttcaacgctgtttggttcatgtcatgcgcaatatctgcgctaaagtacgcgtcgacgatcgtgaaaagatcatgaacgaattcaaacaggtgcatcaacagacaaacaaagaagaagccacagctgtcctgcatgacttctataccaaatggggcaaggtttacagccatgttatcagaagcttgaaagacatagaaccagatctgctggtcttttataactatcccaagcagatcagagcttcaatttattcgactaacatgattgaatcatttaacaatgtgatcaagcgcaaagctaagcctaaggcagagtttccaactgaacagtcgcttgatgcttttattggtattcaggcaatgagctacaatgaccgttatttcaatcgaattcataaaggctttggtcaggttcaggacaccttagaatcctactttgattaaataaataattaaaaaatcaatttacgagaaagaactatttacacaaaagatttgacagtttcctattttttgttcaatttacaagttgctttaaaaatagttgttttatattaatgagtaatttaaaatttatataatacagaaaggaactttatatatgccaaatttatccagtgatttaacttcaactattaatgagagactaaacaacttgaccgcatctaaaattcgagcatttgaccaaaaggtctctgaaatttctgggattattaagttaactattggtgaacctgatttagcgacacctgatcatattaaagatgccgcaattcgtgatattcaggctaatgattcccattatgctcctcaagctggtaagccagaactacttgaagctattagcaattaccttgaccgctcaattggtgtacattatgatccaaaaagtgaaatctgtgtcactgtcggtgcaacaggtgcattaaatgatgtctttatgaccttgcttaaccccggtgacaaaattttggttcctactccggtttgggctttatactttcagctaattaaaatgactggagcaatccctattcaagtcgatactaaaaaagatgacttcatcttaacagctgaacatttacgtcatgttctcaatggtcgcggtaaaggtgcaaaggcaattattttaactgatccttctaatccaactggccgcgtttattctgccacagctctaaaagccttagcagatgtcattaaggaatacaaaatcttttctgtaactgatgaaatttatgcagaacttgtttatggcaaagccaaacatcactcactttctgaatacatccctgacagaaatattttgatttccggtttatccaaggcttatgctatgactggctggcgtttaggctatattgctgcccctaaacaaatcatgaagagcatccgcaagattaattcatttttagttacttcagttactgataacgttcaaatagctgctgtcgaagccttaaacaatggtcaaaacgatcctaaaaaagcacgtgaaatctacgaagcacgtttaaactttatgcaatctggcttagaaaagttgggctttgaaatggccacaccgcaaggagcattctacatttttgctaagatccccgaaaaatatggcaccaatgatgaacaattcgcttttgagctggctcaaaaagcaaaagtcggtgtcactcctggtcgctactttggcaagggcggtgaaggttatgtccgtctttcttatgcatcatcaactgagcaattaaaagaaagtttagctcggattagtaatttcgttaataatttataattcagataaaaaaataagtgatctcaattaaagcgagatcacttattttttattatattgatttattacttatcccaagttgaattttctgcagcatcttcagcagccatcttttcaagacgctcttcggttgcctttacactgtcttggtacttttcctcaacttcgatccccaagtcagctaattgttgatcagctactggagctggagcatgcatcattggttctgaagcagaagcattcttagggaatgctgaaacgtcacgaatattatccttatcagcaagcatcattgcaaatcgatcaagaccgatagctaaacctgcgtgaggtgggaagcccatgtccaaagcatccatcaagtaaccaaattgttcatatgcacgtttcttagtgaaaccaagtgccttaaacatattttcttgaattgagcgcttgtggatacggattgagccaccgcccatctcatcaccattcataacaatatcataactacgtgcgtgagccttatgaggttcagtagttagcaacttaaccccttcatcatctggcatagtgaatgggtggtgagctgctacccaacggccaagtccttcatcgtattcaaataatggccaatcaacaacccaaacaaagtcataaacacccttaggaacaataccagtttctttggcaaattcacgacgaaggtggtcaagtgaatcacaacataccttccacttatcagttacgaatactactaattcgccgccttcaagatcaaattccttcttcaaagcttctttgttctcatcagtcaagaagcgagcaacagggcctgaaaattcgccatcttcaaatttaacccaagccaaacctttagcgtggaaacgtttaataaagtcagccttcttgtcaatcttcttacgtgagtattcttttgcaccatttttaacagcaattcccttaacaaaaccgccatcagcaattgcaccggagaagaccttaaagtcactatccttgaaaattgggcttaagtcatgaatcaacataccgtaacgagtatctggtttgtcacagccatacttgttcattgaatcagtccaagtaattcgcttaattggagttttaagatcaatgcccttgacatctttcataattttcttcaaaagaccttcagtataactctgaatagtttcttcatcagcaaatgacatttccatatcaatttgagtaaattctggttggcggtcaccacgtaggtcttcatcacggaaacaacgagctaactggtaatacttgtcaaatcctgcacccattaaaagctgcttgaacagttgtggtgattgtggcaaagcgtagaaactacctggatagattcttgatggtactaagtagtcacgtgcaccttcaggtgatgacttacctaagattggagtttcaatatcaataaaaccattttcatcaaagaattcatgagtagcacgcaaaatctttgaacgtaaaataattgcttgttgaacttctggacggcgaagatcaagatagcgatactttaatctagtttgttctgagacttcaattccatctttaatttcaaatggagggttcttagccttgtttaaaataatgatttcagttgcatcaacttcaacttgaccagtcttcatgtcagggttaacttctgaacgcttaacaactttccccttaacttgaacaacatattcattaccaagtgaatcggcaatatccattaacttcttaccagaatctttgttaacaacgatctgaaccaagccttcacggtcacgcaaatcgatgaaaaccaagttacctaagttacgtacacgttgtacccaaccatagagatttacatcttgaccgatgtatttttcagtaatattgccacaataatctgttcttttttcgatcttttccattgttactagtccttcaattcatccattattttagtcatgttatttagatcttcaagacttaaatcgattgtcttgccatcagctaaacgtttaatattcaaaacgccgttagccagttccttttcacctaaagtaataacatacttagcaccttcacgatctgccttcttgaattggttctttaacttcttctgattgacatcaaagtcagcttcaaaaccttgattacgaaggctacgtgcaatttcaattgccttttgtgcagtaccgtcaccaatattagtaataaagaaatcaataccgcgtttctcgaataatgcaggattttgcttttcaagcactaacatcaatctttcttcgccaatcccgaaaccaacggctggagtagcgggtccattgaattcttctaccaagtgatcatatctaccaccaccaagaatagtagttgcactttcccataagctcttatcttcaaccataaattcaaagataattccagtatagtaatcaagtccacgtactagatcatcatcaattacataatcaataccaagttgacctaacatcttcaagattgcgtcaaaattagcttttgaatcgtcatccaaaaattcacgaatcttaggtgccttaggcaagaacttcttatcacgttcatctttagaatctaaaatacgcaatggattatcacgcaatcttctttgtgagtcttctgataactcatctttcaaaggagtgaaataattaaccaaagcatcatgataatcttgacgtacttgctcattccccaaagtgttaatgtgaagttggtaattcttaacgcctaactcacccaataaatcatgtcccatcatgattgtttgtacatcacttaatgggttgcttgagccaaagctctctaccccaatttggtgaaattcacgttgacgaccggcttgtggtctttcatatctaaaagttgattccatataaaaaacattaaatggcttaacaacttctggcgcatacatcttgtcttctacataagcccgcactacgcctgctgttccttctgggcgaagggcaatatggcgaccacccttatcatcgaagtcgtacatctgtttttcaacgatttctgaactatcgccacttgaacgagcaaagatttcataattttcaaaacttggtgtgcgaatctcacgataatttgcgcgattgaagaaatttctggcagtttcttcaactttttgccatgaaccagattgatcaggcaaaatatcaactgttcccttaggtttttgaactctcatttaatcatcctttttatattttgataacttgattaaaaataaaaagcgcccttgaacttaatcaagggcgcttagattagcacggtaccacctttttggttgctgcgattaacgctcgccaaacgatccattatctgttaaaggtgtcacagaccgcgatctatctactctctcaccacaacgagcagtctctttgaatagatcattgctaatccacattctttgtcatcgataattcttacttagcttatatttttctcaagacattgtcaacctttgcggtctcattttttcgctaaagatctaacacaatcgtgaatggaccatcgttttctaaactaacttgcatgtcagccccaaactcaccagtctcaacgtggaaaccgtcattttctagttcttgattaaagtcttcccaaagttctttcgatcttggtggacgcatcgcatcaacaaaactaggacggttgccttttttagtatttgccatcaacgtaaattgtgataccgacaaaatttctccgttaacatcctttaaagacaagttagtcttcccctcctcatcttcaaaaatacgcattttagctattttatcagctgcttttttgattactggcaattcatcaccatttttgatgccaactaataataaaaagcctttaccaatcttgcccacagttttaccgtcaatatctacttgagcatgatttactctctgaattacaactcgcattaattatctgacctcttagtttcgtatacgtctggaatatcacgtaatttactcaaaatttcatctagttgatctgcatcccgtacagcaactgtgacatacatatgtgcaacattatcttcgtttactttaccagagatattattaatattcttagtaagtgagttcaacttattaataacgtcactaagcagattggaacgattgtaaccaaagacttcaatatttgcattaaaggattgaacactattttcctcaacattttcccattcaacatcaattaagcggccttgttcttcagcttctttggtgatattacggcaatctgttcggtgaatagttacaccgcgacctttagttacatacccaataatcttgtcacctggaactggattacaacacttagctaaatgaagcattaagtcactaacgccttggatcatgacgccatttttatgcttaaccttcattgtagtatttgaattcttcttaggttgttcttcttgaactgcttgttgtccagaattcaaaatcttttcttccagctctttttgtttttgattttcttcctcacggcgcaaatcaaccgtcaagcgattaaccactgcttgagcagaaagatcaccaaagcctactgccgcatatagttcatctgcagtgtgataattaaagtgctctaatagcttttcaattcgatccctggccataaattctttgggtgaaagatcctcatcgcgcaacatatcagcaatcaattgttcaccatgctggatgctatcttctctatcctgacttctgaagtagcgtctaatcttgttgcgtgctcttgaagtcttcaccatgtcaacccagtcacgcgatggcgctgcattagtctgtgtcataatttcaataacatcgccattgcgtaatttatagtccaaaggaactaatttgttattaactttggcacctactgcatgactaccaacttgagtgtgaattgcataggcaaaatctagcgtaaccgaacctttaggtagttcatatacttcacctttaggcgtaaaaacataaactctgtctgaaaaaatatcacttttaacagacttcataaattcaccggcatctttagtttcatcctttaattcaaggatttctcttaccatatccagcttttcaccagaggtactttgctcaacaccagtaaaattgccacgcttataagcccagtgtgcagccacaccatattcagctactttatgcatttgttcagttctaatctgaatttctagtggacgaccgccaggcccaataatggttgtatggagtgattgatagccgttaacctttggcatagcaatgtaatccttaaaacgacctggcattggcttccattcagtatgaacagcacccaaaacagcataacaatcacgcacatttttaacaattacacgtacggccaataagtcataaatctcatcaaaatctttatgcttattaaccatctttttatagattgaataaatatgcttcggacgaccataaatttcatatttaatgcctaattcatttagagtcttcttcaaagtcttgattgtatcggcaatatatttttcacgctggcttcgcttgacatccatcaagttaacaatgcggtaataggcttcgggatttaagtagtggaaagacatatcttctagttcccacttaattgtcccaatacctagacgatcagccagcggtgcataaatatccattgtttcggaagcaatacgccgctgcttatcaggtcgtaagtgttgcagagtatgcatattgtgtaaacggtcggctaacttcaccataattacacgtagatcttgagccatggcaatcaacattttacggtgattctcagctaaaaattcttgatgagacttgtactcatatttgtttaacttggttacaccatcaacaataaaagctacatcttcaccaaatttttccttcagctcatcatttgtaactggggtatcttccactgtatcgtgcaaaaagcccgctgcaactgtatcaggatctaagcctaatgtagctaaagttccagccacttgcgttggatgaataatataaggttgtccagacgcccgtttctgtccagcatgagctttattggcaaattcatatgctttttcaacaaaggccacctggtcatcattcatatactttttgcaggtatcaattacctgatcatgcgtcatttcaatgtatttggacattatgatcatcccctctagcggtaaatatttttattcattaagccaaaagcttcaattattaagtaaattaaaccaaacattaaattatacaaagcaaaatgtggcaacattgctaagcagaaaagcacaggtaacaagaaaatccaccacttggacaggttaagtttaataaataaattgcctagatggtatgcaatgatgctgttaataataaaaaacagaattgcttctcgccacactaccggcacacggcaaatgctaaagatatacggcaaaatcattaccaaaatactccaccagacaagtgacatccagcgatgagaattcaacttcctgacaattggaattgcttcgattttatttcctagttttttcattaaaagattgtgcctctcatcaaagtttaatttaattgataatattttaccatatttatttttcttttctagtaattgctagtccaatccagcgaccttgacgcatggttaaatcgaccttaaagccattctcgtctagagccttttcaatcttaggcaattgcaggtagtcaattccagaaaagataacttgaccatcgtcgtttaaatgactatccatttgtggaatcaagtctagtaaaatttctgccaaaatattggcaacaatgatgtcaaacttgcctttaacatcagctaacaaactagtcttttgagtgtgaatattattaatatcgtttaaggctgcattttgtttggctgcagtcattgattcatctgaaatatctgtggctaaaacgtcagttgctcctaattttgatgcagcaattgccaaaataccggaccctgtaccaacgtccactacattcattggcttaaccattgctctctctaggcccatcattgctaattgagtagttttgtgatttcctgtaccaaaagctaagcctggatcaagcttaattaattgctggtccttaaaagcgggtttgtaatcttcccattcaggcacaattgccaagtgacgtgaaaaatcaatcacgtgataatacttttgccatgccgtgttccaatcttggtccttaatgtatgaagttgtaattttggcatcccctacatctaggccatagctcttcaattcctttaacttatcttggaatttttttactaatgcgtctttatctgcttcttcatcaaaataagcatagaaatatgtatccttaggtaagtctttaatgtcatccatttcaactacagtagaatcatgcaaccagcctgcttgctcaaagtcgctacgctttcttgattcaatacccaatgcattcagattatctaaagcaaaaacgctcaaagcgtcttcaacttcatgactagtatcaattttaataattagtaatttcattaatattatctcctttgggattttcttggcataatgctatcatgataacaggtgataaatatgtcaaagaagaaaaataaaaagaacaaactcgaaaaaacattggtcgaaaaaatcttagaccaaaataaaatcaagtatcgtcaagctcaatttgctgtctccgaagataaaggcggagttgcacaaataaacacttctattttagaagacaaagagcgtttagtctataaaactctcgtctgcgaaggaaataaaactggtccattggttggtgtcgtaccagttactgaacatttaagcatgaaaaaattagctaaagtttctggtaacaaaaaatgtgaaatgcttcccttaaagaaattagccaaaacaactggttatgtacatggcgctaatactcctatcggaatttattttaaggaaaagtttcctatctatttggatgactctatgcaaggaaatcctgaaattggtgtttctagtggtgaagttggccgcagtgtctttttgaacccagaagacttagccaaattctgccatgctccttttattgatctaaaagaataaaaagcgcttacaatttattgcgttattcttcttcttttgtgttatagtaaatatatgtaccgcatacagaatataacaattacatagaagaagatgacaaaaatgaatatattgttaggaattattggctttgtagttaccatgatcgctgcctttgttgttacggcattagcaattgccaagtaaataaagcgaaaaaataataacagatttaaaatgacgtggtttgatatcatgccattttttattttctatataatagttatttattatcaaattataaatatttaatatataaggctaaactatttatactaaaaagaaagtttttgcctataaaaaagtcaaatttatatcagcaatgttatttatttgtgctaatctaatatgttgtcaaatgtaaaaagaacacattgataataaattgtaaaagactcagtcttttacgttcccaaaagaaggtttagataaattaaacacaaaaatgatttgagcttcaatacaaaatttaatggaaaacaaaaatttggttttagaaagttgtctgttggtttagctgcagttgcacttagcactacttttttcttaagtaatagtcaacttgttcatgcggatactaatactgcgactaatgaagaacaaactcaacaagattcacaaaaatctaatcaagaacagtcaaataataccatccagtcaactcaagctgatccaagtaaccaaaataatcaaagttcagctaaagattcaccaaaccaagaaaaaacaaaacaacaaacagtcgaaattaccgcttttcatacagatgaaaaaggtaacaacgcttccgaaataaaaaaagatgaatcagcttctttaatggctggtcaaggattgcttaaagagaccaaaacattctcatggaacggccaaattaaaggtagttctgacagtgaaactgaacaaactaaaactattagctacgtaattaaccatatctacgctaacggaagtcaaaaatctaacactccatttgcatctgatgaagtcatgctcaaacttaaatctgaagattcgggccaaagctggactcaatattctattgataatggcaaaacttggaacgctttagcccaagcatatactgtcacagtttctcctaataaaaacgctaatgcaaaatatgtagcagacttagttaatattgttactcctgataaaattagactcaataatcaacaccaattcattattgcttcatcaactccagacggtactcactatgaattaactattccctactacataactcaacatgcagatgtcagattttatgatgacactgataaaaccgatcaagcaatcaataaactacttaacgataatgggtttcaactctcaatgactagtgatgaagctggtcaagggcttagtgctgattaccaaaataaagacgaccaatcagctaatacccctattcaatttagcagggtagaagaagcattagctttatttaaaaataagcactataaaattgaaaaagtttctggcgccaatgccacattaaaaacggacagcagtatcggctttggcaactttgataataatgaaaatgtagatcaacacttcatcatttacttagttcatgaaacgcagatagaaaagcaaactgctacagttagggaagaagtaaaaggctactatgtaaacggtcttaagagccaaaacttttccggtataaataatccagatgtggctgttcctaaaaatgatgaaacacctactccaaatgtagtaaaagaagttatttactctagaagcagggttgttgatttagttaaggatccgcaaggcacagaaacaaactggtcacaatgaatatcaaacaatcaagcattttcagctattccgtataacaatactacaattaaagacataattgatggccattatcatttagataaaaatggcgtggttcacattgcttcttcacagaataaacgtactgctacaagcaattcaattactgggatttccgcaattgcacctaattcggagtttttagcttcaattgcttctaccacagttaatggtcaaaaaacaacaactggcaatctagcaactattagcatttgggtaccctatagttactccgcttctaaaccggaaccaaccccaactcctattcctacacctgaatctgagactccgactactccagaacaaccgaagcagccttctgagccaaataagtctgaaccacctaagtctaatgaatacaaacagacaaagattcacaaaaaagtaaattggaattctagcagtcatccttatggcactgatatgcaaagacagaagcaacacaaagatggaattattccaccccatggaactgccattaataatattccaaattcaacaacaaagactagaactactaataatatcgttaagtcttacaataatattagttctaaattaccacaaactagtcaaaataattctaacctgagcttaatcggtctagctttagcagcactaggactactgggatttactattacaaaaagaaagcatgattaattaacaatagcaaactaaaagagacagacaaaaaatccgtctcttttttctaccttaatttatttaatctgcatgtctccacttcttatcagttaagatacgtgcagctaaaagacctaatagcaaggccacgacaatcatcaacgcttctacgatccaataagctccgatattaatattcgtgattccaaagttaaatacagctcgatacatgtaaagaccaggcaccataattacaattgatggaacagtaattgcaattcttggaaaaccaacttttttccttacaatacttgctaatagaccagctgttaaagcaccaataaatgctgccaaagctggagcaacctgagcataatcgaccaagctaagacgtaatgtatttgccattgctcccattaccgcggctgtagctgccatttgtggtcgactgttaaacataattgaaaaaccaaacaccccacaaaagctagccagcaatcgcaagcaggttaaagtccctggatcaatttttaacttaggcatagatcctggatgcaaacgcaaaattgttgctacagcccagcctgccatcgttgcaattacgataattaaaatcgcataagtcagccgttcaagcccagagcgcatatctaacttagacatgtccaatccagatgtaataaatggaaaacccggaattacgaacaacatggcaccaatatagccataggcatgatcatgattaatgtggaataatatttctcctacatgaaaactcataaagtaaacactgcaggctatggcaaccgcaaccgcaatcttggctaccaaagttaacctgtgcttacccataattgctctaatatattgaccgcaagctgcacccaagaaagcacagatcacctcaggaagaccgccgcctaataagaaaataaagccgccgcaggccaagcctgaactaagtcccgaaattaacggagaatacgctgacttttgctgagaaatctcccgtaagcgtttatgaatttgaccgatagtccattccccatgtcccttttcaaattgccgaacgaatttttccatttcattcaacttagtcatattcacacctgttgctggtaacgataaagtctgggaatatgattcattatcaacatcaaaacaggtatattcaattgacactaatccaatatccgttgaacaggtaatgcccaaggttctggcaaccgtatccattgaatcacgtactcgccaagcacctgtaccacagcttaaaagcataatacctactcgacctacaatcgaggtcttttcaactaatgttgcatcctgcgccatcgtattattatcgctcttgaaaaattcctcccacagaatcttcatatgatgtttttctgataaatgatgttctcgatcaatttcactcatgctattattactttccctcacatagttcgcataattataaccattatattctaccacaggaacttcatcataatttttgatattttaaaatttgctgctcctttttattattttaaatttataatagacatataagttattttgaaataaaggatgatttaaagtggctcaattaactgatgaacaacttgctaacattgctcatgacttttaccttagtcagcttaatattgctgatatctcacaaaaatatgatttatcgcgatatttaatcgctaaagcactagaagacgcgcgtaaccgtggaattgttaaaattaaaatctcgcgtggaatcaaacgcaatcaggtactagagagagaatttcagaaaagattcagattaaaagaagcttttattgtcgaaactaccggcaaccgcgatgaaaatagtgaagccgtagttaacttcgctgctaaacaaattgaaacctatctaaagcaagcaaaaatcgctggtattagttggggtgcaacaatgcatggcgtgatcaacgacttttttgagcaggacttagagcaactttactttattcaattacttggtcaaccaattaattctaaccgcaggaagaatccattggcccaagatgcagcagaaaaattgcattcccatagtctaagtctgccaaccccactttatatactaaatccaaagatcatgcctgccttgaaacatgagccttattttaaagtaattgaaaattgttatcatcacttagacatgcttttcactggtcttagtactttccaatcatttcaagctaatcaatttttgaaagaaaattatggacctgaactatttaaagacattcctgactgcgatgtagctggaatgatcatgggacgaccatataatattaaaggtgaatttttccctgacttcgaacaacacatttgtggtatcagcatgaatgacattatgaaaacgccaattcgtttttgtgtcgtccgcaatcgctttaaatctgaggcactccttggcgccttacgtagcggtatcattactcatctagtaactaatgatgcaattgcccaacgcgttttgcaaaatatcgattaattcgctaaagtaatacagagatagactatttataatgaggagaaaaaatgaaaaaatctaaatatgatttatggattggtgcactgaacctgatcaattgtgtgttattcattagctcttggtttgccatccttggagctgacttcactgctagaatagctttaatattttacttatttgcctggttcggcgtgatccttaatgccgttgcagtagtgcaatcgcataacatgaatatctcaccaattgggccaattttaggagtaattggtaatgcactatatggctttaccgctgctctagccttacctgctgtgattgttaatattatttctgccttctttatctttatgtactggttaacaattactaaagttggatttacaatgactgggaggtgagcattatggagtttagaattgatgaatgtattccagatgttgtatcaatgatggctttagcacaagcaattgcaaattttgacctcaatggtaaaaagccacaagatgtgaacctaggaaggatggcaaatgtctaaagtttttcgaaatgacttaaaaataaaggacatccctaatcaaagaaaacttagggatgtctttttttagcctaaatatgaaattgctacttgtaattgtgccagcttcattgccgcctgagccacattcttgcgatcaacatcaacaaaaatttcacagtgtttttcatcaaattcataacctgaccctagcgcaatatcttccgcagtttcatataactctttatcttcctcattaggatctagcttaaatagaattcgtccgccatcactaacgcggcaatgatcatcggcttcctcaacccaaacatatacggtatcgccataagaatcaatcatcattgtggcaatctgcaatgtcctatcgtcaacccaaattgtcttggttaccttagcaacatacgaacctatttcatggttaattttctttaattcatcctgcttcattttttacctctaatttataaattcttttctttaatataaggataccctcttagcaattcttctacaaatttattaaatagattggatctcccaatcagcttgactgttaccgcttactaattataccttgtaaatatactaaattttggagaaaaatatgcatactaagggtttatcagttaaaaatgttgtagcgatcggaattggatcggcaatctatgttattttagcacgtttcacatcgattcctacgcctattcctaacacaaatattgaattagtctttccttttttggctctttttgcgtcaatctatggcgctaaggtcggttttattgtcggctttattggacatgctttgtccgatttcattatgtacgggcagacttggtggagctgggtattagctactgctgttttaggctggatcatcggtttagcggccaaacgcttagacttaaaaaatggtatttttggtattaaacaaataatcttttttaatatcattcaaattattgccaatattctcgcctggattgtagttgcaccaatcggtgacattatcatctatagcgaacctgctaacaaagtttttgtccaaggaatttcggctacgctttctaatggtattacaattatggtcattggcacgctcctacttaaagcttatgctggaaccaagattaaaaaaggcagcttgcgcaaggaggattaaacaatgcctaaaacaattattgaattcaaagatttttcatttaagtatgacagtcaggccgagccaacactaaaacagattaatctaactatcaaacaaggtgaaaaattgttaattgctggaccatcaggttcaggtaaatcgaccattggccgctgtattaacggcctaattcctaatctagatactggtgagatcaccggtgaatgcactattaacggcaataatattaaagacactaacctatttgatctttctttcaccacctcaactatcctacaagatactgacagtcaatttatcggcttaactgttggtgaagacattgcttttgctttggaaaacgactgccaaccacaaaattatatgaaacaagttgttcatcgctgggctgatgaattagggattgagcatttattaaagcaggcgccacaaaatctatctggtggtcaaaaacaaattgttgctctagctggtgtcatggttgatgaatcaccaattttactttttgacgagccacttgctaatttagccccagcttcaggaatgaaaacgatggctttaattgatcgcattcaaaaagaattaaatgctacagtaatcattattgaacaccgtctagaagaagtttggagtcagcctatagatcgcattatcctaattaatgatggtgaaattgtagctgataagaagccaaatgatctattacatgagaattgtttagaagacgttggtgttcgtagtcctctttatttaaatgccttaaaaaaagctaacgtcgaccttacgcgtattcccgacctaacttcagtcgctgctttgccccaagatcctgaaattgctaagcagttgcaagaatggcaaaacaacattaccctaagtggtgaaaaagaagagactcatcctctattagaactcaaaggcgtcggccaccgttatagtaaattgcagattcatcctttacatgacgttacagcgacaatcaatcaaggcgattttgtttcaatagttggtcaaaatggtgcgggaaaaaccaccctttgtcgaattatttgtggctttatcgacaatgagggacttattttatttgatggtgataaccttaagcagttttcaatcaaagagcgttccgataagattggttatgtcatgcaagatcctaaccagatgatttcccaaaaaatgatttttgacgaagtagctctaggcttgcgtctacgtggttatgatgagcagactattcgcactaaggtctatgatactttgaaagtttgtggtctttatccgtaccgcaactggccaatctctgctttatccttcggtcagaaaaagcgagtcacaattgctgcaattttagtgcttaatcctgagttattaattcttgatgaaccaactgcagggcaagattggcaaacttatactgagatcatgaactttttaaaacagcttaatgatcaaggcaaaacaattatgattatcactcacgatatgtacttgctgatggaatacactaacagatccctggcttttgctgatggaacactaattgctgacacagatccaatcaagttattaactgaaaaagctttaattaaaaaggctgctttgaagcgaacctccttatataatctcgctatcaaatatcaattagaaaatccagatagctttgtccgcgcctatattgatgcagaaagggatgaaaaacatgcataatgaaagccaagttttaggttatcaacctggtgattcttttatttatcaattaaacgcaaccactaagttagtttttatgctcctagtctcggttgcttgtatggtaacttatgataccagattcttaattgctatctgtattttatcaattttcttgtttaaagaggcaaaaattaagtggagtcagatttcttttatcgtgaaatttattgtagttttcatgttgctaaatctgatttttgttttcatctttcagccaagctatggtgaaaatatttatcattctaaaagcatcttgatccatgccggctacttcacattaacattgcaagaggtattctacttattcaatcttttcttaaaatatgtctgctcaattccaatcgtattgctgtttctattaactactaatcctagtcaatttgctgcttcattaaataaaatcggcattagttacaaaatttcctatgctgtttctctagctctacgctacatcccagatatccaaaattcttattgggatatctcagctgcccaacaagcacgtggcaatgaactatccaaaaaggctagtttaggcaaacgaattaaggggacattgaatatcgtgatgcctcttatcttctccagtttggatcgaatcgatacaatttcaacagccatgcaattacgccgctttggctcaaagaaaaaacggacctggtatgtcacccaatcatttaaaaaagctgattatcttgtaatgatcgcagccgtgattttggtattaattgtggttggtctctggcaacttgatcatggtagattttataatccatttatttagaccaaaattaaaaggacctaatggtccctttttggttttcgatttttctgtttatgatcatcttgagtgacaatctcaggtttcttaggaatcggcggcgtgattatttcataattatgcaaacgatgttcaagatagtcatctaatcgctcttgcgtattttcatgtacaataatcattaaatcgcctcacttttcataattatacctcaaaaatgtaggttaaacagcgtaattactaagtatgtcattccactagcaatcacaggacctgcagctacacccttgaaaaccactactccaataatagtacctaaaactaatgcaaccgtcacctgtggcaccgctgctaattgatcaacaccataacgtgacaagatagctacagcaattcccgctaaaatggcaatccatccagctggcgacttaaaagttttaatcagatccttaaagccaatctgtcctgtcgcaataggaactagaattgcaaccgaaataatagttacgccccaattaatcccctttgcttgaatagtaggcagccatttactagtaaacggtaataatttaaacaccattaccactcccgttgcaataattaatgacatgtttttacccaataacgctacaactagcaccaatgctagaaataaccaactttccatatttatctcccctcaaaaaatcattagcattagttcactttaacaaaaatattcatcaaaacaaaataatgagtctaaataagtgaaaatcaatctaatttgtgtcataataaaattactcagaaaaatatatgtatacgcgcacctcgttcttaaaacgaggtgtttttttacgcaaagaaccaatgcagatatttcacctacactggttcttcttagttgaccgatattgcgatgtgactttactactgcatcgtagttagaatttgcaaatatttatgcttgaaaataaaatatttgcacaaataattaaaaaacgtttcttgcaaaaatacaacttaacattttaataaaaacaaaaagatgccactttcgtgacacctttgtgattacttattcatacatttcgttttgaactaatccctaacttccttaatggtatcaatgatagtaccatcacgatactcaactaaggcaaccgtacgatcagtatattcaagtggctttggtacaccaacttgtttttcagccattttttgcaattcattaatatccaagatcttaagtcctggcaccttactaaaggcatccactaaatcctggcgagctggattaatggcaattcctctttcagttactaaaacatcaattgatgaacctggagtaacaatagtttctactcttggaacaacagtcgcattacgtccccgaacaagaggagctgtaataatcgtcatcttggcaccagctgcggaatcttggtgaccaccgacggctccacgaatgacaccatctgagccagtcataacattaacattgaagtcagtatcgatttgtaaagctgacaagattgaaacatccaagttgttaaccactgcacccttattatgaggatcagcataccaagaagcatcaatttcttgttgatttttattgttagccattgattgggcagcacccttatcaaagtcctgcacatccataacttttctgactagaccttcttcaagtaagtcagtggtaggtttagtaataccacccaaagcaaatgatgcagtaatgccatcatcaatcatactttgacgtaagtacctggtgacagctaatgcagcaccaccagaaccagtttggaagctaaacccttgcttgtaatatggagagttaatgattacctggttaaccatttgagcaatcttgagttccttaggatccttgggaaagcgagtggcaccagaaccaatcttgtctggatctccgactttatcaattttaaccacataatccacttgatcttgctgaattgacgcaggcgtatttggataatcaacaatattatcagttaataaaacaaccttattagcatagcgagcatccattagggcatagcccaatgagccgaagacagcatccccatcttgaccgttagcattacctgcgggatcagatactggcacacccaagaaggcaacatcaaccttaatctcgccttcttcaattgaacgagcacgattaccatgtgagcggaaaattacaggattcttcaagccgccatgtgaaacaaaatcacctagtgaaccgcgcatacccgaagaagtaatattagtgattactccctttttaatcgctccgataactttatcattcataacaccagtaagtgaacttggagccaaggttaaatcctggtaacccatactaataatcttgtccattaccaagttaaaaacataatccccatttctaaaatggtggtggaatgaaatagtcataccatctttcaggttattcttgattacctcatcaagtgaatcaataatcttattttgtccagtagtaactcttacctttggagcaacccgcttaacttcaggatgaccaatttcagtagtttcaaatggtttcaaattcatttttttcattaaatcatctggtaattcgcgttttactttattctccaatgtagttaccttctttatcaatcaagttagaagctttcgctgtttccaaaaccctggtagccttttctacaactggcttatcgatcatcttaccattaagtgaaataacgcctgagcccttagctttggcttcacgaatggcattttcaacattcttagcttgctcaatctcttctttagttggattaaagaccttattaaccatttgaatttgacgtgggttaaccaaactcttgccatcataccctagttcatggatatagttagtttcacgatagaagccttcagtatccttcatatttgagaacactgtatcaaaggcatatacgtctgcggcccgagctgcttgtaaaaccatgttacgcgcaaattccaattcgcgaccatctggataacgatgagtatgcatatctgcagtatagtcttcgccagataccgccaagcccatcattaaaggcgttgcggttgcaatttttggggcatttaagacacccttggctgattcgatggcagccatcacgccaatagaaccattttcaatgtcaaattcatcttcccaatgttcgatatcctttaccaatttttgaatcattgcagctgattcagttttaggcaagcgaataacgtcaacgccggcttttaccattgccttaacatcttcatcgtaaaatggcgtgtcttgaccattaacacgaactacaatttcactgccaccgaaatcgactgtcttaattgcctcatagaccaacattctggcagcatctttttccgttaatgaaactgagtcttccaaatcaagcataatcgaatctgcaccataaatgccagcatccttaatcatagctggattattaccaggtacaaacatcatggttctacgcaaacgattcttaacgtatgtcatttagagcacctccaaatctggcttgtctgaagtttcggttgcacgttgtgcagctgctaaagtacgagccttaattacacaatccagtgctcccttatcggttgctttaaccttggcattttctaagccataagcttttaaggtgtcagtaatcaccttttcaatctgatctccataggccttttttacttctgattcaaggtcaatctcaatgccgttagaaccctttgaaatcatgatttggatatctgaactctcaagtgttcccgcaactgctgtggttttaatttccattaatattcattcctttctcaattttagactgcaatttctgcatgttttgcttaataaattcataagtcgtttccggcacgaatttattgatctcttttaaattgccatccttgatcagctgtctaactttagtggcagtaacaatttgaccgtctttttccaagcgatcaattacgattacttcaatctcaggaccaagctcatgcgctaggctaacattataaaagtgagtcgttcttgaaattggttctttaccaatataacgacgggtaatgttcagtcctggtgcaatttgattcttaaagacagctgcgtctatcaccgtttgtacagcaattaaatcgtcaggtgattttaagaagtatgctggaaaagtagctggtgaaaccatgtagtctccgccagagattactttcacattactaaactccttagtaccttcttgcaccaatttgaagcgctcatcaaagctaaacaaagaaacatcattagccacaacaaagacataaaccaaatcgttttcttcactagccatcttaatcaaatgctgatgacccaaggtaaacggatttgcattcatgactattgcagcgaccttcttatgctcttgatctgctatttcgggcacttcagccacaaattccttcacatcaggcgttccattttctaaaaaggctgcctgatccgtcttggctaacaaattgaagtgcaagtgctcaaagctagttgcatactttgctttagtaaagacaaaggaatggaaaattccatcattagtcaaatattgcgttaaggctgtaaccactttattaaagcgagccccctgcgtatcggcatcattcttgactccgatatactttaagacattaccagccacactaccagtaccaactaaattgccttcctcatcttctagcccaatagtatgatcaatcacgttaacttcgcgttcactaaaatcatttaaccccaatgattccaacaagttttcccatttttgcctagttgtagcgtcgtttaaaaacaaatcaacgactttatccataaatatgccaccttgctatttcggtaatcgttttcacaaatatagtttactctcttagtttgattatttcaatttatctattaattttttaaatttttcaaaaattcagcaataatctcatgcgttttttctggttgctcagcctgaggcaaatgcccacattccggtacaatcgccgtttgaacatcttgattcagcatttttatcgcttgggtaaattctggattaaaaaatggcgattttcccccagcaattaccagcatgggaaccggcgtatccaaaatcatgtcacgccaatcttgctccgcatgttcaactaaacagttatagttttcggctggatcatatgggaattcttgatattcctttttagcagccaaaaacattttttcatcaatgtgatggtaaaaagccttgccaaaatcaaatttaagcatgtcaggataattatcccaagttaggtctttaaagccatacttccagctcttatccgcaatcatctttggtgactggtctaaatcaaccattgcctttagtctacctttgccataaattgacaaatatgcccaaatattggcggcccccatagaatttccaatagctactacatcatgcaaattgagcttaactaatagctcctctaagtcaactgcatgacgactaatccgctgtccacgataggttcgttcggactgtccttgattgcgtggatcaagcataataaaacgataatcatttttaaataaggcaattaaatcttgccacatttgacaagatccccctatacctgggatcccaatcaaagcaggcttatcttcatcccccgtatcggtataatgcaaaattacatcgtcattagttttaaatttcatctttaatcttctttcattttgattactcaattctattatgacgcaaaaaaagcaacctggtgattcccaatgtcattaagttaagacattgacaattaatattagacttttaaagcactgatttaacatttaattggttaaattggtgcttttttcgtacaacaaataaggcatagcacagattctgcttttttaagctacgcgatataaataatatacagctgatttgggcttaatatttctcttgtccttgcggcctggtctaattggaatggtataatagctgatctgaataaggatccgttcaaaatcttgcgttaaagaagaagccaaatacatgctctgaataatcaagcatgattgcttgaaattgatggcatattgatacttgcaatgcttttgcggaatataggcctgtgcatcaatttgactgattgcattaaacataatcatatgggcataaatttccatttcaataaatttatcttgtttggaatggaactgtacactgcctaaagaatacttcaatttcttgaaggaggtctcaataccccaacgcagatgataaagctctttaattctttttagcggataattttttcgatcaagattggttagcacaacttcccattcttctttgcctgatttggcatcattaattctaaatttgcaggctcgaaattttattgtgcataactcgccaaaatcccagcttagatcctgggtatttttagagcgatacttaatatattggcgataatgatgctggacatggtgaatattctcactggctttatgcgtgatgtagtaatagttagaagtagttaccaggcaggaaatctcacgatcacattcttgatcaggcaatgtcgttatttctttaactccgccttgtccagccttagttcgtattatgtaatgacagttaggcaggcgattgcagttttcaatcatattgaaactagtgtagccacgatccattgttacaatatatggaccacaattcaaagctttaagcatttgaacagccgctttgcgttcatccatttctgatttaggctgaaaaatacaatcctggtaggtattattcaatagatcatataaggcattaacgtgaatttgacaatagggtttctttttatgagaagaagcttgtacaatgttattcgatttcggattccagatttgattaaagtcagagccatcaatggcaaacaaacggtagtgatgatcaaaaagttgaatattaaatagattttgattaaaaacagtcagaatatgtttaaaacaagcaggagaaagctggcttttgcgttgaacataggcagaagtactaactactttatcgttctttttagttgcatcttcgccaaaagctctaaagagttcactgtttaaattctgaccttgcatgttaattgtagttttaaggactgtcgctgcatctaaagtgcgtttcctggtaaaagcatgaggattattaataaaatcgtgaatatgatccccagtattattgataatttgatcaagacgttctagaatattcttatgaagggctttcataattaacaccatctttctggcaataattttgaaggtttaaaatatataatatataagataggcgaaaaggctggtcttttcgcctttattttatacaaaaaaagagatcgaatccaaatgattcgatctctaaaaaagcacccttaattgtcaatgtcttaacttaatgacattgggtgattccagattgcttttttttaccataaaccaataatcttcatccaaagaactccgacagttccaaaaataatcatatagattaatccaaggacaaaattcatcttccaccattcaccttgtttaacatagccagtagtagccaaaattgtggcaggaccattagcatagtgagtggttgatgcgttgattgcaccagtaaaggctaaaagcattgcggaaaggcctaaaggagcaccagttgcaaccgcaacagacaagaatggcaaataaagagcagtcatatgtgcagttccacttgcaaagaagtagtgggtgtagaacaaaagcaaaactagaattgccaatacaaagccccagctaacaccatgaagactattttgaactaatttggagaaccaatcaataaatccgtatgaaatcagcttaccagccatgaacatcaggatagaaagccaaatcaagatattccaagcaccagtttctttcagagcatcctgcattgttaacacaccggtaatcatcaaaatagttacagccaggaaggcaacaaaagtcgcatctaattgtgggatcttaaagaaactagacaaaacccataaaacaattgaaagaatgaagactgacatcataattttttctggagttgacattggtcccatttttgctaatttttcatcagcccatttcttagcatctggagtttctttaatctcaggtgggtacatcttgtaaataacaaatggaatgattactgccaatacagcaacaggtacgattgcagtgaaaaaccaacctgcccaagacatttgatagcccttttgtgcggctaattgttgagccaccatgttaggagcagcaccggtaataaacaaagccgttgataaaatattggcatgaaaggcagtaaagtcaatgtaggcaccaatctttttacgagaagcatcatctggcttagaatcgtagccttcttttgaaacagattcaacaactggccaaacgaccccacccgtacgagctgagttcgatggaattaaggcaccgagaattaattccaatccagtaatcgcataaccaatacccaatgacttcttaccaaatttttgaatcataatataggcaatacggttacctagacctgttttactaataccatgagccataatgaaggccatagcgattaaccatgcagcagagttaccaaatgaactaagcacgccttgattaactaccataccttttgcatttgtaacgtccttcattggtgctaagccaactaaaacagttactaccaagccagctaaggttgtaccaccaattggcaaaggttttgtaatacaccctacaattgtggcaacgaaaacggcaaacatttgccatgcctgaaccgaaaggccacttgggcgccatggagtaatacaccacaatacaattccaacgatcaaaggccaaataaagcctttataattcactttttctaaagttttcataagaatcccctattctctatggacgatacacatcatcaatgatgtcaaagcctttatctgctaagcttttatctacccaacttaaatcaacttctcctttgctaaaggcaattgctttagcctcatcctgctcatgaaaagcttgtgccttaggcaaaatctcaggagcatctttacgtggaatacaaattactccatcagcatcccctaaaatcacatcacctgggttaacactaacattcccacaagcaacaggtacatttatttcaccaggtccttctttatatggtccacctggggtagtactggttgcataaatcggcagtttccaatttcttaaattatcaatatcacgaattgggccaccaattacaatacctgcaattttcttttgatcgcgtaagtaagacatcattacctcaccaatcaaagatctagtgttatcaccctcgtcgtcgatgacaatcacatcgcctggctggcaatactttaaagccgcataaattgctaagttgtcacccgccctggtgtgaaccgtaaatgctggaccaaccatttcctcatcaggattcgacattaacttaattctaggattcatagcacaatttcgttccatgcaatccgcggtattagaagctgggatctttttaaaaccagctacaacttttggatcaggcatttgcctctttaaataaattctttttcctacaggcatagagtagctctcccctctttatgctccctaatctatcttgttattgttaaacaagcctttttataaaaactaaaactcatcacaactcacaattagtattatacacttatcaacagattaagcggttacaaattttgaattattttgattttttacttattttttgaattatttaaactcaaataattatgcaaaaaaagtgtctgggaaaaaactaattctcagacaggaaaaaagaacgatgatttcctaatggatttcatcgttctttttctatactttaagtgccttccttgatattattgaatcaccacaaaacaaaaagaaagaaggcaatcttaatgtatcaaaattataccataggtcaaacagctttaacactcaacttagacttcgctattcctcataatcatttggctaataccattagctggtttgtcgattcaattccagaagatgtcttattgggtaatactgctaaaaccggtcgtccagcttatcatccagcgatgatgcttaaaatcttgctttttgcttattccagaagagtattttcaggcagaaaaatcgaattaatgctggaagaaaacgtgccgatgatggctttggctgaacaccaacagatttcttaccatactatcaataactttagatccagcaagcatgccaatgagctggttaagaaaagcttcctctactttaccaatttgttagaagccgagggccttatcaatgaaggagcgatctttattgatggcactaaaatcgaagctgacgccaatcgctatacttttgtttggcgcaaggcagttgaaaaatttcatgacaagctcaaaggtcaagcggttgagctttatgatgaattgattgccaaagaagtcgtcaaagcaatggcaaaagagaaagtccagaccagtcaaggtttggcagagctagcacaagaaacggaagccgagattgaaaagctgaccgaagaaattgagcaagaacccaaagcaatccctggcggttcgcctagaaaagcaagaagacgcggtcttaaaaagctgcttcataaactaagaaaagactatgttcctcgaatgaagaaatatgaagaggcgaaagaaatctttgcagggcgtaacagctattctaagacagatcatgacgcgactttcatgcatatgaaggaagatcacatgaagaacggccagctcaagccaggctacaatattcaagctgccaccactgatcaatatgtggttgactttgctttataccctaatccaactgatttcagaactttcgaaccatttttaaagcagatgacgacactagacaagtttgacaagattgtcgctgatgctggttatggcagcgaatataattattcaatgttagaagaagagtattcagacaagaagtactatattccttataccatgtacgaaaaggaaaagaccagaaagcatcgcaacgatccgactaagctggctaactggttctatgatgaaaaagatgattattaccttgatcaaaatggcgtcagattcaacttcaaatattatagtcaacgtaaagatcgatcgactggtcaggttcgtgattttaaggtctatgaagcagatgaatttcaactaacgccagaattagaacgcttagccaagactaagagcggacgccaacgtcaggttcgctataatcctaactggcaatacctaaaagaaaaagccaaagcagttctccaaagtcctgaaggcagacacatctacagcatgaggaaatatgatgtggagccgatttttggacatttgaagaacgtctttggcatgcgccgaactcatttcagaggcaaaaagaaggttgaaacagatataggaatagccttcatgatgatgaatttaagcaaatattggaacagaagatggtcaaaagaccaattttctttgttcaaaaataaaaatagacagaaaaagacggtcaagcaactcaaattaagagttggattgatcgtctttcagtatctaagggttagttttttcccagacactttacttgatctttgttattttgatcttattcaccaaagttttcccaaggcattacgtcaacagccggttgatcaactaactcttgcaattcctttggcaaaaattccttcttcacaatcacatcgtaaacatattgttcaaaccaagcttgactcatttcgtagaagcccttgtgaccaaacttgtcgccccatgagttttcaaccttccacttacggatatgaccgttgtcttcatcaacaccgactaaagtcatatcgtgagtagcaaagccctcaccagtattcaaacgatcagccttgctcatttgcgtatcaacgtcaaataattggtcagtcttgtacaattcagtatccaaaaagccagtttttctttccatttgcttcaagacatcgttaccaaagctaactgcttcacctgacttaagttgagctactgcagcttgagctaagtattcaattggcacattcaagtatttgacttgatcgccgccagccacattgtcataaagtggcaagtggtaaaccttgttatattcatggttaggaatgttggacaaagcaacataatcatcgaagttgaagtccttaaagtatttttgaacaaatgcttgtggagtcaaatcacgctccaaatggtacttcttatcatcatcacggtattccaaatcaaatttctttggtggttcacccaaggcaactgataccatgcgataaatttcgttcaagaattccttcttggtcttttctgcttcatccctcttgccttcattaactaatttacgcaaaacaagagcgtcttttctctccttacgagctaagttttcggctaaagcagtagtattattagtattaaagctttctggcattgcatatgaaggtaccacgccatactttttaactaaattaatggccatggtccaaaggccaccatcttcaccggcaaactcaagccatgcttgaacatgacgatcagttaaaggtttatctgccaaacgaataattgcattgtaaaaagcgttagcacgttcaatcttgtcccagaagaaattataagcttgtgagaacgtaaaatccttgaccttgttttccttgccaaagtagtggcgcaaaacattcaaagtagtgaattcccagcaacgaccagaatgcttctgatcagttacaccgccaatatcaagttcagttgaaaagacatggttaagtcgttctgatacgcggtcattaaatgaagcttcaagcaaaccactacgacgagcagcacgagaagctactttattctcaggattagaattaaagctttcagaaaagccttcaatttcttgttgtgaaataactgtcatgatatacctcgttaattcttatcttttaattttttattaatcttttcttatataatactattttctagcttttttgtcattaagaaaaagtcctagtttttgacaactagggcttttaataaaattaatgatcaattaaaggtttatacctgacaaaacttcttgcatcttgtctgctgagttaatcatcttagcatgctcagtatcggaaagcttagtttcaattaccttttcgatcccttcaccgttaataacggttggggtacctaagtaaagatcatgcttaataccgtattcaccattaatcggagctgaaagtggcaaacaaattgcacgattgtccaaaatagctgagacaatttgagtaagcatcattgcaacaccgtagaatgtagcacctttgttggcaatgatcttgccacctttcttacgcacatcggtctcaatttctgctagaacatcatcgttgatttctgagtaatcacggagtgccttaccagcaactgttgattcatcaaagttttcaaaactagtatcaccgtgttcaccaagaaccattgagttaaccttagcaactgggacattcaaacgctttgaaagttcaacacgaagacgcattgaatcaagtgaagtaccagtaccaattacacggttcttagggaaaccagacaacttttgggtcaaagtcgtcaaaatgtcaactgggtttgcggaaacaacaaagacaccattaaatcctgattcaactactggcttaacaatactttccaaaatcttaacgttcttgttaaccaagtcaagtctagtttcacctggcttacgaggaacaccagcagtgatcacacaaacgtcagcatctttagcatcactataatcggctgcaggatgaatattggtttgacccataaatggcgtaatatcttcaaggtccattgaatcaccaacaggacgatccttagctacatcaaaaattgctaattcatcaacaattgtattttgcaataagtcatttgcaaaagttgaaccaacagcaccatcaccaacaagaaatacttttctactcataagttaaattagtcctttcaaatgtttataaactgttttttatctacatgattaattatacactaagcgctttcattagacacgatttattccataattataaattataatatcccatcaaaatctcgccagtgttattatttctatcgaaaaagagcagttaaccaaccgctctctttacataatctttcttatattatttactttcacgaacatatttagccatctgaatacctgcttgacgaccaaaaataactgtttcggcaattgagttaccaccaattcgattatttccatgaagtccgccagatacttcaccagctgcaaataatccatcaattacattaccattagtatcaagtacttgagtttcagtattaatatgaataccacccatagtatagtgaattgctggatgaacatgaattgcaaagtatggaccacgatccagttcacgatccatcccagtcgttctgccaaattctttatccttaccagttgcaacggacttattccaagcggcaatggtcttttctaagttggcaccatttacgccaatttttttagctaaatcagccaaatcagtaccatgttctactaaaccaatctggtcataaaactcaactgcagcaaaatgagcccgtacacctgagtcaaaaatcaagtatgccccatcttcatgcaaattagtaattgcactagaaacaatctttcgtgtacttaattcattaacaaaacgttgaccattcttgttaactaagatagcaccttcaccgcgcagaccttcaccaattaaataaacatgcggattatcagtatctgcagttgggtgaacctgaatgaagttcatttgcattagttgagcatcaagtgcttcagcaagcttcagtccatcgcctgtagcccctggctgattagtagtcttatagtcaactaagtctggacgatacttcttaatgatatccttggaagcaccaaagccaccagtagctaaaagaaccaccttagctttaactgttttaatgccatctggtgtctcaacttcaacaccattaacgcgcttcttagcatcttgcaacaacttggtaactttagcaccagtaaagatgtcaatacccgcttttttcacctgtgttgtcattcgtgaagttagataaaatccaactggttccattgaagcaggacggtgagcacgtttcttactcatccctcctgtaatggtcaaatcagttaaacgaataccatatttcatcaaccatgaaatagctaaagcagagtggttaacaaagtacttcaacatggcacggtcatttaataaacctccaccttttaaagtttcttcatagaagtcacggttattatcaatgatcccttcgtcaagctgaaccaaagattcagaagcgttcattccacttgaagcacgactagtgttaccaccagttttctcatttttttcaagcacaacaacatttagacctagttcatgagcttgaagtgcagcagtcagacctgctccgcctgagccaacaacgatagcatcatatttattctttaattcttttgtatttggcatttcttactttccctattcttctggagtagacttatcaacattagtcatttgcatatagtccatccattcatcatattgttcttcagtaactttaccactcttcaaagcagcttctcttaaagtagtgccttctttatcagcagtttgcgcaatcttagcagcagcatgatagccaatatgtggcgacaaggcagtaacggtcattaatgaattctcaagtaattcatccattctttcttcattaaccgttaagccatgaatcattttatcagcaaaaccagtaattgtaccagttaaaatatcacaactatctaagaatgatgcaatgatgactgtcttgaagacgttcatttcaaaattaccttgactagaagcaaaggtaatggtggtgtcattaccaaatactttagcagcagccattgttacagcctctgcctgagttgggttaactttacctggcataatacttgaacctggctcatttgctggaatatttaattcatggtagcccgctctcggacctgaagcaagtaaacgaatatcttgcgcaatcttaaacatatcagcagccaatgttttaagggcaccatgaactacatcaagacctgaatggtgagctaagccccagaatttattagttttaacttcaaatttatgaccatagacttctgataatttaccagcaattttttcggtcattcccggtgctgcattcaagccagtccctacagcagtcccaccaatagctaattcgtagagagttggcttcaattcacgaatatatgataagtcatgtttaagagcagaaatatagccagataattcttgaccaaaagtcaaaggcgttgcgtcttgtaagtgggttcgaccaactttaacagtcttccaatatttcttttctttaacaactaattcatcaattaagtgttgaattgctggttccaacttgtccaatgcttcaacggcaacaatattcattgcagttggataagtatcattagatgattgaccacggttaacatcatcattaggcaaaatatctaaacctgggtgcaatttattagccaagttagctacaacttcgttaacgttcatgttgctttgagtacctgaaccggtttgcaaaacatgaagtgggaagtccttacgcaagtcagtatcgcttaaagctagcaaatgatcaattgcatcttcaattgcttcgcctttttcttttggttcatcgccaacttcaacgttactttctgcagctgccttctttaagtgtaaaaatgctcgaataatttgcaatggcatcaattcaccacttgggaagttattgcggcttctttcagtttgagggccccataaagcatttttagggatcttaactggaccaatagtgtcactttcaacacggtattcttcttcgctcatattatattcctccttattaagctctataaggtttgcgttaattatcaatcaccatttataatacctgtaaaggctttctttttcaatttcattccaaaaaaagacccaggatttttcctggatcatagttttatctagactggtgattcattcttttagcaaagaagtcaccaatgatttgaacgataaaaatcaaaataattactaatacagtagctactaaagtaacatcattattgaatcggttataaccgtatgaaatagcggtattacctaaaccaccggcacctacagcaccagccattgcagtcaaaccaatcaaagaaataatcgtcaccgtcgaaacacgaatcagttctgagcgagattctcttaaataaacatcaaagacaatatcacgcgcagttgagcccaaactttctgcggcttcaaccttacctgggtcaacactttctaaagcaacttgcacctgacgagcataaaatggaaatacgcctaaagttaatggtactaaggctgccttcattccgatctgtgtacctacaattttttgagtaactggtgcaacaaaggcaagcaggataatgaacggaatcgctctgaagattgaaactagcttatctgagaaattgtaccagaatttattgggccgaatcccgccatccttagttaaaactaaaatcacgccaaagataataccaagaatgccaccaaagatagctgaccaaaaagtcataaataaggtctgaaaaatactagtgccccagccagcgtctccgccccagccaagttgaacaacattgggtaaatatttacttaagaaactaatcatgatatacattccccttttcatctaaacgtgtaaatgtcacattttgcttagccaaaaattcttgtgtttgcttttgcttagctggatcgcctttcaccaataccaccaaagtaccaattggctcttcattcaaaagttcaacattcccataaagcattgaaacttctacgccaatttgcttatacaattcaataatgattgatttagtcacattagctacgctgtaaactaattgataaattgcttcatttttgccaagcttatcaagcgccaatgaattcaaagtagaaatcgcttcaagtgatccaccaacaaacttcttggttaaatcctgcttaggatgtaagaagacatctcgcaaactgccgtcttcaatcacattgccgtgttccatgacggcgaccttagtggcaatcttcttaacagcatccatttcgtgcgtgattaagatgaccgttaagtggaactttttgttcaaacgcttaagcaggtccaagatttgttgcgtattttgtgggtccaaggcactggttgcttcatcagagatcaaaatatctggattattagccaaagctctagcaatcgctactctttgttgttgcccaccagataattcagctggataaaagtcagccttatcttttaagtcaaccagatcaagcaattccaatgaccgtttttctaattcctcatcactcaacttttcatgttttaaggcaaaggctacattttctaatacagtcgtttcatttaataggttaaaaccctggaagatcattccgatgtttctgcgctttaattgcaattctttattagaaatcacctgcttgccatctttaagaaattcagtgccatcaacggtaatactaccggcagttggtttttgtaaaagattgaccgttctaactaaagttgacttgccggcaccagagaagcctacaattccataaatgtcgcctttttcaatggaaagagaaacattattcactgctttaactcgttcgcccttcttctgagggaaggccacttctacatttttcaattcaacaatactcatttttgatcctccttacttcaacttaacgtcccaggctgcaatttgcgtattgccatagtattccttagttagcttcttagtttctgcagtttggtaagccttgacgacatcttggtaaagcttgtccttttgtttgccttgtttgacacaaagaatgttaatccattgttttgaatctttgttaattggttcaatgtaaatcgtttgcttatcagtcaagccagcaggaccagcataatcattatttactacagaagcgtcaactgaattcaatactcgaccagtttgttcagcaccgatttccttaatcttgtagttatttggattgctggtgatatcagctacagtaactaaggtcttacccttcttcaacttaattaagccggcatttttcaaaacaaacagtgctcttgattcgttagtagcatcgttaggcactgcaatcgtggcaccatcaggtaagtcactcaatttatgatacttgcgtgaataaagtctgatcggtgcgatgtaggttctaccaatggcgacaacgccaccgtgatttgccttattccaatcctttaagaaggcatagtgttgaaaagcattcatgtcaatatcgcccgacttcaaggccttgttaggttggttgtaatccgtaaagttcttagtttttaaggtaataccatatttttccttagccgttttagcaattgacttccaaattgcggcttcggctttactttccccaacgattccgactgtaacagtttttgtctgattttgactgggaattcctggaccaaaactaaaccaacctgcaatcacgatcagtatcccaatgatcgtccaaataatggtatttcttcttctccgttttctcataaaatacactcctactttgataaaaataaaaaagcacccatccccaaaggacgagtgctcgcgttaccacctttaattcgctgatcacttacgtaatcaacctcactggctatcaaaaaatagcctgcactgttaacggatgcagccccgccgatagctaaatatcaccaccggtcatcgttccaaacccatattcactagctcctatttgccaactttcaccaccacgctggctctctttatcaatagaagttctagttactcagtccttcaagatgttgttttcttgatttgttataaataagttatcatcttcttttaatctagtcaacatcttttttaatttttattagataaaagcgatttcattgtataattaggatatagttaaataatttatttttgctaaggagaaaaaatgaagaaaaatcgctttcgaagttttgctctctcattagctgcagcaattggattcatttcttttgctaatactaatgtcccatgcaacaatcaaaccgtctatgctgtttcagataaagcattagtcaatttgaaataccacaacaaacaaattgtgaccgttgatcatgatcagccgcagttttctaagagtacattgagcaagaaaaaaggtccatggcaaaaatatagccaattagattatttgaaccgagctcatgctgctaatgctttactaaataaaagattaatgccacatagtcagcgtgcggctttaacttggaatccgaccggctggcataataaacgaatcgctagtggttggttgtataatcggtgccatctaatcggctatcagttgactggtcaaaacaacaatccacgcaatttgattaccggtacgcgtgaattaaatgatccggatatgcttaaatatgaaaatgaggttgctgaatatttacgtagttcgagcaaaaactatgtccgctatcgggttactccaatatttaaagggaatgacctattagctaacggcgttgaaatggaagccgaagcaactagcaaaaacgggcttcgctttaatgtctacatttttaatgagcaacctggtatgttgcttaattacaagaccggtacttctaaggttaaacatgggtctagtactattgctgaacatgtaaaatctagaaaacgatccacttctcgagtaaccaagaaacgaaccattcaccatatcaaaggtactgtatccactgcagaacaccgagtcgttggcaatcgtcgcagtaagatctaccatgtaatgaacgggcaaaattatcatatgtcatcagctaatgcagtttacttcaacagtgaagctgccgcacaagctgctggatatcgaaaatcattaaggtagtaaaaaagtcagagcaaaactctggctttttcattatcttcttatttcacattatttttgccacgatcatatgcttccttgaattccacaaaagtcatgttctttcctttttgatcaaagacaaccaacacttcggcgattccatccaaaattttagataaccatctaaagatagtcactgccgcacagaataagaccgccaaaataaataatgatttgttattaagcattgtcaatgagaacaatcttggaaaaaagatagttgagccaataatacagataactgataagcccataacagcaagtctaaatttgtttattggtgccgaaatatgatacatcaccataaaaccaactaagactagcaacatagtcgctgtcgtgcctacctgaccatgatcaagtgagatagaggcccctgcaatgactaaaattgcaactgccagccaatctgttaagccccctggaattgcccgagctaaaacatttggcataaactttccacgaattcgcttgtggttgctttctaaggccaataaaaacgacggcaagccaattgtaaatgcagagatcaatgtgatctgggctggctgcagcggataattgattgtcataatcaaagagaagatggccatcaagaatgaaaaaatatttttcaccaagaacaagctggctgaacgttgaatgttattaactacttgcctgccttggttcaccactaacggcattttagcaaaattagaatcgagcaaaaccacttgtgaagcttgcactgcagcactattaccagaagccatagcgattgagcaatccgcctttttcatcgctaaaatatcgttaactccgtcaccagtcatggctacggtattaccttgattttgcaaagcaacgacaaactttcgcttttgatcaggcttaacccggccaaagacattatagttttgcacggcctgctcatattcaccatctttaatggtttgcgcatcgatatacttatctgccccattaattccagcttgcttagctactcgagcaacggttaccggattatccccagaaataaccttgatatcaacaccttgctggttaaaatattgaaaagttgacttggcttctttacgaattggattcgacaataaaatataaccgagaacttgtacattttcctttaaggcggaattatcttcagttaatacgccaggataattagccgcaatcaacacccggtagccttctgccgcatatttttcaaattcagtttgatattgcgcaaattgatcacgcaaaaccatttcaggcgcaccaattaaagttgtctgattgccaaaaattacaccagaatatttattgactgaggtaaaaggcaaaatgctatccgccgttttggttccatctttaaaataggcttgaatcgccttcatcgtcgcattatcagctggcatgtttttagcaaaatccgcaatgatgctacttaaatcaccagtaaaattcttgctactaacagctttttctacggccatcttcggttcggtaattgttcccgttttatctacacaaaggacatttactcgggctaaagtttcaacactcttcatatcgtgcagcattacttcttgtcgcgctaatcgcatagcagctagagctaaggcaatcgtagtcaataaatatagcccttctggaatcatcccaattaaagcagcttccatggaagtgatactacgcttgagtccaatattattcaaaaagaaactctgactaaatagggcaattcccaccggaataatgatgatgccgacccatttaaccagacgattgattgaacgcaccatttcagattgttcaacactgcccattgcctttgcttcgatcgttaatttagaaatatatgagtctttacccactttttctaagacggcataagccttaccggaaactacaaaagaacctgacattaattctgcgtctttagtcttagtgatttcatcagattcacctgtcaacaaggcttcattaacccgcagctcacctgagattacccgcgcatcagctggaatctggtcaccagtttgtaaaagaacgacatcatcttgaaccaatttttcgatgggaattttttcttcttgcccatcacgtaccgcgataatttccgtcgcattcatcacgtttaacttgcttaaaacttttttagcacgaagctcctgcacaataccgataatcgtgtttaaaacaatcactggtaaaaaagtcagatcgttccaggcaccaacaaacaccaatagcacagccaaaatagcaaaaatcaagttaaaataagtaaagacattttctcgaattatttgagtagctgttttggactggtcatcaatggcttgattaacctgtccattttgaattcttggatcaacttcagcttgagttaatcccgttatttgtttatctgtcataattttctgtcctatactgaaaatactttcatccattatagcgaaaaataaaaaagccacgcaactctgcgagactttttaacaattatttattttttctatgataagttaaaaaagtatagtcatacttgttcttttcatcatgatgatgctcttcgcgactaactaattcaaaatcatcatagttaatcgctggcatcactgtatcagttttaaaattagctttgatctctgttttttctaaaagatcaacttgatcaagtaacgccctaaagattgaaactccaccaattgcacagatttcttcagtctgatgttgacgaagatattcatttaattcagctaatgtggacacaatcttcacttgctcattacccgcatatttttgctttaattcttgacgatgagttaaaacaatatgttttctctctggtaacaagtgaggcaaactcgcaaaggtttttcgccccatgatgatcggatgacctatggtcttttccttaaaatgcttcaagtcagccggcagatgccaaggcaaatggccatcgatgccaataccatgctgctgatcttcagcccaaacaaaacttaacattgagacctcctaaactgcaaccggtgccttgatcgtgccatggtgctgataattcagcactttgatatctttcatttcaaagtcttcaatgtgctttttttcaggattaagccacaattcaggtgaatcatatggcgtccgactcagcaattcctttacttggctaaagtggttgcgataaatatgtgcatcccctaaagtatgtacaaattcacccacttttaagccggtttcacgcgcaatcatgttcaagagcagcgaatatgaagcaatattaaatggcacgcctaaaaacatatcaccacttctttgataaagctgcacgctaattttgccatcgactacataaaattggaacatgacatggcatggtggcaaagcactagttggcacatcttccggattccaggccgtgacaatcattctacgagaatctggcgtttccttaatttgcttaatcacgtcagcaatttgatcgataaaaccgcctgtccgcttttcccaatgacgccattgtgccccatagacatcacctaagttgccatatttctgggcaaaagcaggatcatcaagaatgcgctgatcaaatttcttcatttctgcttgataaacttgattaaattctggatcactttgactacgcaaaccaaaattagtcatgtcaggaccctgatattcaggactttgaacccaatttttgaaggcccattcatcccaaatatgattgttatgctctagcaaaaagcgaatattggtatcgccacgcaagaaccacaacaattcacttttaatcaaaccaaatggcacctttttagtcgttaaaagtggaaagccctgtgtcaaatcaaaacgcatttgggcaccaaaatatgatctagttccagtaccagttcgatcatccttgtcatgtccttcagtcataattttttctaacaaatccaaatatggttgttcaagaattgccattatcttcacctttcaaaaaacatttcttctaacataccatagatcttatatgttggataatgaaaaaccatagatttagtgtttttagataaaaataaaaaggtgaataatcaccttaattacttttcttaaattcatttttgtgtctaactaagtagacgattgttgccacaatcaagactaatgcccctgcgataactgaaattctcgtatcaggattgagaaacatgaaaattacaatcattatcaacattgcaaaggcaaagtaatttgaaaatggatataacggcaatttaaatggatgatcttgtatcgcttctttgttatgccgtctaaatcttaattcagctaataaaatcacaaaccaaggaatcattcctggtaaaacagatgaactgaagacaattacaaataaatcactagctgaatgattaaattgtgaagcaattacgttcaagacaaaaccaataaaaataccagcagaaatccccataattgcacgatcaggtacaattcgcttagaaatatgcttaaaaattcccggtgcttcgtggtcatgagatagcttaaacaacattctgctggaagaataaatccctgagttagcaccagaaagagcagccgttaaaacaacgaagttaattattgaagcagccgcagtaatccctactttagcgaaagtcgttacaaatggtgaacctaggctgtctaatttatcccaaggataaatcgttacaatgacaaaaattgctccgacatagaaaattagaattctaaacaaaactgacttaacacttttaacgattgcctcttgtggattggctacttctccagcagaaatacctaataactcgattccttcatatgaaccaacaatgattgacattgaaaagaaaaatccttttattccaccagtaaagaaaccaccgtgagaccataaattgctaaagccagttgggtggccgccattacctacaccaaagaaaataacgataaagcctaaaataatcattaaaataatcgttattactttgatcatggcaaaccaaaattctagtgatgcataagccttagcactagctaaattggctagtagtaaaaaggcaataatgatgatccccgaccacagcgccgaaatattcggccaccaatacttcagatattcagttgccgcgactacttcggacattcctactacaatatattcaaagacattggcccacatcgctaaatagccggctaagggatgcacatattctgttgcataatcagcaaatgaacctgtccctggattgatataaagcatctcacctaatgcccgcattacaatatataaaatcaaccccacaaacatgtaggctaataatactgacggaccggtccatttaatagtcgaggttgaccccataaacaaaccaacaccgatagcaccgccaagagagatcatctccatttggcctgctgtcattgttcgtttgagttgaggagctttagattttttattcaattttcacaactccaataattaatctatcctaattaataacccgcaattaatttactggttaaatcaacattttgtcaaggttcaaattaaaaatattaatatttgggagtcttttctctaattgattttttattcttttattaaatgaatttcgcgatcaaacatttcctgcatctgtttattaaaattgtgagcaataaagacaattgtggtcttgctttttaataatttttgtaaaatatccatagtcgctgtctgatcaattgcactagttccttcatcaatcaaaataatgtcactatcatggatcttcgatcttgccaatacgatcttttgtcgttgtcctccggaaatattcaaattatccaagtcaattttttcatcgacacctgctttaaactttttaatatcggccgcaaaattaacttcatcaagcacttgagctacttgattattaagttgcttgttgaacattgtaatgttttctttaattgtacccggaaataggttcggctcttgtggaatatagcctattcttgacatattaggcttaattgtcaaaccttgactattttgaaattcaattttgcctgtgctaggtttaagttcacccaaaatcaatttaaataaagtagacttacctgcgcctgaatctcctgttaataagattttctcgccaggtttaactgcaatatcaggaaaagtaagcttttcaccattaggatactgcaaagccaaatcttttgttgaaaatgctactggtgtctcttcttggccagctttaactttttcaatcacagtagcatcaccatcaacttgtttcattaaatcctgtgacgatttcataaaacttaatgcctgaattgtttgttgtaagccgatcgaaatattagctgcaaagttttggacagacataattgcaccaaaaatcactaaattcttagtgatcaaaaaagccgtcaaagacaacaggattatttgtcctaccatgttacagatcccattcaaaataattaattgctgttgagcagccgtttgtttaacatgagcctgttctactttacttgaagttttttcacctacctgaaataacttagcaccagcaaaatatcttcttaattcttctaagccagagaaccatttagctaaaacatctagataatgcttattttgctcagaaacattattagttgcttgttccattttcttttgtactaatttaggtacaaagtaagaaacaatatcaatcactacactagtcaaaaagattgaccaattaattgtaagtagagccaccaatgccgcaacaaacattgagccatagaacggcacaattggataccaatcaaaataattttttctaatcattagtcatccgattttgcacggccggtacttgatgattttgaccatctctaaagtaatgtgtagccaaacgagcgcgcacctttttattatattcttcttcctgcactcgaattacaaattggatataatagatcatcccttgagcagctaaatataaaatccccattaaagccgtcgcaagtaaaatcttcacccaagcacgatctttgatataagtcagccagtacatttgaatgtagcctgcaccaatagcgaaactgtcaaatcttttgtgtaaatagttctttctcgcaaattgattttttaattatttatttaatcaaagtaggattctaaggtgtcctgaacctgaccaaagcctttatgaattcgattgaaataacggtcattgtagctcattgcctgaatgccaataaaagcatcaagcgactgttcagttggaaactctgccttaggcttagctttgcgcttgatcacattgttaaatgattcaatcatgttagtcgaataaattgaagctctgatctgcttgggatagttataaaagaccagcagatctggttctatgtctttcaagcttctgataacatggctgtaaaccttgccccatttggtatagaagtcatgcaggacagctgtggcttcttctttgtttgtctgttgatgcacctgtttgaattcgttcatgatcttttcacgatcgtcgacgcgtactttagcgcagatattgcgcatgacatgaaccaggcagcgttgaaaatgagctttaggataagtcctggccaaggctgttttcatgccaacaacaccatcagaaagaaaaagctcaacttgctttaagcctcgggatttcatgttttgaagcatatctgtccagacttcaatgttctcgctaggtgcaatgcagtagtcaatgacctccttgtgcccattaggcttgatgccaatggcaatatagactgcttcacgctcaaatgtttctcggcgcaaaggaaggtatgtcgcatccaaatagacgcagaaaaacttgtcgcttagcttgcgtttgtggtaagcctcaacctttggaatcatctgcttggaaatatttgatacctgagctggactgtaatggctgccatacatcttttcaattagatcggctatttccctggtggtcacgcccttggagtaaagcttgataatcatgctttccaagatatccgagtgctgcttgtagtcaggcagcgtgtgctgatgaaattgaccgttgcgatcccgaggcacttgcacttcaattggtccaaactgggtatcaaccttgcggaaataagcaccatttctagaattgccagtattccagccatttctggcatagggatcatagcctagaaaggcagtcaactcagcttctagcaagttattaacagcctgttgtagctctttgcgcaataaatcatttattttgtctggattgaatagagcttgagcaaaatctttggtaaaatcattcatgaaggagttcttctttctgtatgtgtttttttgttcaaaccaatcatacgagaaaggaactcctttttctaatgttttaagaaataaatttaaggaattattcatccttacacaaactattttacagtctcccaatagcagcgacacctgaaataactgataaaatattaatgtaaataaatcttaaataattagttttaataaagcctttgaaactcattcggcgtcacctcgattagtcaatttaatttgccgatcaaacattgaaactaattctgtagaataattgtgcgcaatcataattacagtacttggagtattcaataaattttgtaatacttgcttcgtcccagcactgtcaattgcactagtcccttcatcgatcaatagccaaggtgattgatgaatcaaagctctggctaacacaagcttctgcctttgtcctccagataaatttcctttatccaaatcaatttgactattaagtccagcagacatcttatccaaatccttggtaaaacctacttgatctaatacacctgaaatttgattatttaaagcactattaaacatcgtgacattattggcaattgtgtcaggaaacaaggtattatcttgagcaatatagcctaattcatcaagatcaaaatttaatttttgaccattatgatcaaaaaaattgatctcaccttggctgggcgttaatttacctaaaattaatttaaataaagttgacttgccagttccactatcaccagtaagcaagattttttcaccttgcttaactgtaaaatctgggtaagataaatactcaccatttttgaattgtaaggccagatcttttacttctagcctgttaatcttcttaacttgatgctgatctggagctatttttactggagcttgaagattagtaatttccttattcaaatccttggtggatttaattaaattccattccgttacaaatgctgaaacaccattcattacagttgaactaaattgaatagtagtaattaccgcaccaaaaacaatttgtccttgcaaatataagtaagcacataaaaccatcaagagcatttgtcccacaatattaactacaaaggtgatcatatctgcaatagcaatagttgctccttgatgaatagctgcttttttatattcgtctgcgctttggttaactgattcactaaatatattaaaactggcatatcttcgtaattcatccaggctactcatccacttggctaaagtgtttaagaacttttcatttttcttagtaacctttattgtggccgatgaagtcattttttcaaaagttttaggcaaaaataatgaaattgcagttaaaatcaccgtcattactactaaaagccagttaaatgaaaacaaaattccaattgagaaaagcacagacaacaagtacataaaaccgtttttgattggttttaaataattctgtgttagctgatcaagattggcaaccaattcattttgcactttagcagtttgggcaatttcatttttaaaaaagtagcgactaatttttacacgaatttggtgcaaataagattgtgattgctttccgtataagtaatctgaactagtaatcaaggctaatctaactagatcacagccaatagccaaacaaataaaaataataaagccaaataaattcattttctttagctggttaaaggccggggtcatcaaatattgcgaagcagcatcaacggttgtaccaatgataaccattagaaaaattaaaatgaatttagctttattgaccttaaaaatccctgtaatactcatttgtctcatctccaagcaaattaaaatattaaaaatatcttatttatgtttaatattactgctatttttttaatattcaattactttttactaagtggttaaaaaaataacttgaacggcaaaattattactatatctagctaattcattaggaaaaattggcaaaaaaatagactagaaactcattatcaagcttctagcccattagtttaattcaattattaacggtaattcttcaagaaatctatcatcttttgataagctgcatcatgatctgcatcatatgcatcgactacatcgactactttattatccttagtaataatacggtactcacgtaagtctttcttttcattagcaacaactgtaatctcacccttacctggggtagagaacaattctggattaagttcttcgttcaacttatctgataattgttggttaaatgcgattgtattcatttttgtttttatctcttttctaaaaaatccaacacagacattatatcattattagataacgttgatgaatttagttttattttttatcaaggagaactgtacctgcagaaggattatgatcaattgcaccaatgatggagcagtaacaccttcaatatagcacagcaatacttattcaaaaaatatcaatttgttattttgcattattacttttacatatagatttcacttaattaaatgcacaacaaacatggcaattcctaagaatacaaaaattaaggcaacaatcatactagttactgtgctggtaactaaaactaaaatgatcatgccaataattgaataaatatccatttgttatccctttaattaaacaataacagcagtatttacttttattatgtagcatgaacactttaaaatacaattttaacgtattttaatttgctaactttcgatataacggcaatagctgcccaataccatctaagatgaagttttccatatctgcaacttgatcttgctttctaaaagcaaattttcctaataggaaactggattgagttgcttccttattaaatgaagtctgtttttcagcatctgttaaatactcatttaaggataaatgatcagcaaactccatttcgtttttatcccataagtaccaattattagttgtccgcccttttgcccaatcaggaagatcagttaataatttattgtattgttcaggattatcgccgcgcttttcactcttataatgctgaaacataagataaacctgcagctgcttattatccagcatcacgccgatgcatggacttttatcggctaaagcattcaaacgataagctgcccagtaatgatcgcgtaagttccaaccattggtccaactttcaacatgaactttagcaaatttatcttgtggtaatttttgataaacatttaagtttatttctttccaggtctgccaaatttctttaaaatctgtttttatttgcgctaattcatcttcagaatattgcgatttcaattttttaaaagaaaattcatcccgatcaaaaattgcatacatttcttcagttaattgcgtcattttacaaagtccttaccatatttacgctagtaacaccagttggatctggaatatcatcattggtctcgccttcattataaaaaccacgtttttcataaaatttaatcaatttcggtaaacaagttaaagatatagcttgacgattttgctttctgccctcttgcgctattgcttcaattaattttgtcgctacgccttgtttgcggtattcaggcaagaccgctaaactcaagaccatttgatagcgatcatctttttgattaggatgattttcaaaatataattcatcttcaatatagcgtttattaaaagcaggaccaaaaatatgaccaatcacttttccatcttcttgtgcaactaaaaaagtatcaggataattctcaattctaccaatcatatcttgttcagtttgctttttagtcatcttaaatgcgtcagattccagttctactacttcatttaaatcatccattgttacggtgcgaatgatcataataagcatcctccttaggtttatctctaaaagtgaaaaagggttcaaaagtcatttagactcttgaaccctatattattactctctatttaattcttccactttaatttaagacgatcttgctcagtctttttttgaaaatacgtcttcaccttcggcactacttcttcgccataaattctaatggcattcatcacatcttcatgcggcattgaggcaattggcaaatgaagatagaagcgagttaacccaagttcttccatgactttgatgatcttatttgcaactgtctcgctatcgccaacaaaaatagctccattttctccaactgcctcaagatattgttcatatgtcatccctgtccattgcggtctttccgtactaatttgatcaactaacaatttcgtaggatagaagtaatccttaattgctttgtctttatcatgatttaaccagccccaagagtgtgcagcaattggcatcttcgttaaatcattgccaactttttctgcaactcttctgtacaacttaattagtggtttaaagtgcaaaggattaccgccaattatcgcataaacgattggcaaacctaactctgcagttcggatagtcgattctatgcttccacctgtagctacagaaatagggattggctttttagtgcgcggataaattcctttatgatcaactctaggtgtaaactttccttttggccaatcgagaatttcttctttgttcattttgagtagcatttctagtttttcaataaaaagttcatcgtaattttctaaatcataaccgaatagatcaaatgcctcagtaaatgatccacgtcctgccatgatttcaactcttcctgatgcgattgcatccattgttgcatattgttcataaactctaattggattaattgttggtagatttgtagtagcacttgaaagatggatttgcttagttttcgaagcagcagctgctaaaatgatttccggtgctgagacagcaaaatctttgcgatggtgttcaccgattgcaaatgcatcaatattcaatttgtctgcaagaatgatttcttctaataagtctctgattctttgatcatgactaattgcttttcctgttgtttctaatggtgtagtttcaccaaatgatgagatacctaattcaatattcattttatcaactcctaaattatttcacttactttttgtaagtaaaataatagcagataatttttgaaaaagcaatatcttgaatatgtgatcctttacttagttgcagttcttctaccaacatatttgataaataaagccatgattaaaataactaaacataaaagaaaaatatatgcatgctgtgttccgattctggttaaatcagctgacttagtacctttttgactagaagcaacgattgctgaagtaattgaagttccgacagcaccggcaaattgttgagcagtatttagaatagcgttgccttgagtagtttcactctcatcaatcactgccaaagtatcagtcataacatctcccaatatcattcccattactgccatgtaaatgatataaactatcaatataaaaatattattcatctgattaggtaatactgcaaaaaacaatgtttcaagcaacatcaaacttacaccaaataaaacaggtttgcgtgcaccataattatctagcaaccgaccaccaattggacccatgattgcaccagcaactcctgctggcaaaacaatcaagcctgctaaaaaagcagtattatgattaaccaattgaatgaaatttggcaataaaaatgcattgcccaaagatattagttgaatgcagaaaaaaccaataatatgacctgtaaaactatgatttttaaataattttagatccaaaattggcattttaattcgattagatctccaaattaacagagctaaagctaataaagcaatcaaaatttgaatagcagttgcacccaattgtcctgttcctaagttgctaaagccaaccagcatcccaataaagaagattgcaattatgataaagctaaggcgatcaatcttaacttttttaacagcagatttttgttcaataccccagatgcctaataacaatgaaataataatcaatggaattaaaaaccaaaaaacctagcgccaattcagttcctgtagaacaatcccgccaaaggtcggcccaagtgctggtgctattccagtgatcatactgccgacacccatcatagtaccaactttacccttaggcacttgttctaaaatgatgttaaacattaatggcagggcgattccagtaccaatgccttgaattactcttccgatcaatagcaccggaaaaattggtgcagtagcatcaactattaagccaagtaaaaacaaaaaattagcggttaaaaatagacttttagttttatatgaactttttaatgcagcagagattggcacgataattgaaactgcaagcaaataaattgaagtcatccattgcacaacattggttgaaacattaaaatcacgcatcaaggttggaaaagcaatattcattgaagtttcaactagaacgccagaaaatgacattaatcccgtggcaattactgctgcaaacacttttgatgatattctttcattatttgattccattttttctccatttttgacaaattttaaaacttttagtgccgtatttatttcagcttgtgtaaaatgactacgaacttttcgatcatcttgacgcatataatcttttatcttgggaataagtgatttactcttagcagttaaagaaacatccttctgtcttttatcgaccgcattagtaacgcgtttaactaaatctcttttctccattctttgaatcatgattgtcaccgttgaacgctttaaatctagtttcttttcaatttcatgttgtgaaacagtttgattttgatgattagaaataaaatctaaagttgtcatttgaacgccggtgatacccaaagtgttagcaaacgtctctcgttcacgatctatttgaatggaagattgcttaataaccttttttatcggttccatataggtcctccttttgttagatgtctaacatattttgcatttatatttgttagatatcaaacatattttttactaatttgagactttagttcaaagtaaatactagtaaatatctatttcatcatttgacgtaaaactcacatctaattctttgagactgtaaaatagtttgtgtaaggatgaatgattccttaaatttatttctttaaacattagaaaaaggagttcctttctcgtatgattggtttgaacaaaaaaacacatacagaaagaagaactccttcatgaatgattttaccaaagattttgctcaagctctattcaatccagacaaaataaatgatttattgcgcaaagagctacaacaggctgttaataacttgttagaagctgaattgactgcctttctgggctatgatccctatgccagaaatggctggaatactggcaactctagaaatggtgcttatttccgcaaagttgatacgcaatttggcccaattgaagtgcaagtgcctcgggatcgcaacggtcaatttcatcagcacacgctgcctgactacaagcagcactcggatatcttggaaagcatgattatcaagctttactccaagggcgtgaccaccagggaaatagccgatctaattgaaaagatgtatggcagccattacagtccagctcaggtatcaaatatttccaagcagatgattccaaaggttgaggcttaccacaaacgcaagctaagcgacaagtttttctgcgtctatttggatgcgacataccttcctttgcgccgagaaacatttgagcgtgaagcagtctatattgccattggcatcaagcctaatgggcacaaggaggtcattgactactgcattgcgcctagcgagaacattgaagtctggacagatatgcttcaaaacatgaaatcccgaggcttaaagcaagttgagctttttctttctgatggtgttgttggcatgaaaacagccttggccaggacttatcctaaagctcattttcaacgctgtttggttcatgtcatgcgcaatatctgcgctaaagtacgcgtcgacgatcgtgaaaagatcatgaacgaattcaaacaggtgcatcaacagacaaacaaagaagaagccacagctgtcctgcatgacttctataccaaatggggcaaggtttacagccatgttatcagaagcttgaaagacatagaaccagatctgctggtcttttataactatcccaagcagatcagagcttcaatttattcgactaacatgattgaatcatttaacaatgtgatcaagcgcaaagctaagcctaaggcagagtttccaactgaacagtcgcttgatgcttttattggcattcaggcaatgagctacaatgaccgttatttcaatcgaattcataaaggctttggtcaggttcaggacaccttagaatcctactttgattaaataaataattaaaaaatcaatttacgagaaagaactatttacacaaaagatttgacagtttcaattctttactaagaaaaggattttagttacatttgttgctaaaatagatttattatttctactcaaaataaggagttaatcataaatgaataaactaaacttcgaactactgcatatttttgatgttgttagtagatttgctagcttcagtcaagctagcaactatctctacctagaccaatctactgtcagtaaaaaaattagacagctagaagctattgtcaataagaaattatttattaggaatactaatggtattgtcctcactgctgctggacttgcttttaaaaataagtcagataaaatacttcaagatttaaaagaaataattgcgctaaagccaactataaccaccttacgagtcggggtatttgataatataagtgcctatctgatgcccgatatttttgctgaaaattttaatctatttaatgagggaaaattagatgcaatagttatcaatagcgacttctttactcaaattcaaggttctgcaattgagacgcaaattactaatgaatcttttgcaattctctttcgcaaaaataatgctctcattgcaagccaaaatagtatttcgttaaatgatttaaaaaataaaaatcgtaaatcaaaataactattataaaaaatatttattggtaatagttagctatgcataaagcgaatgaataaagattattaattagctattacgtttcttaatttggcgattttgtgttaacttgattgttatccaaataacaacgtatgaaagaataaaaataaacaatgtccaaatattgatagaccaattatttaacaacatcattattgagaataagctaaaagttccaattaacataaaaagtcttcctttccgaattcactatttaaataagtggttaaattcaaaatacaggatgctaaaatttaaaatcctaaaaattaatatctgtaagctaaatatttaagttattgaactgagtttgctatatttaagttaaaagataataaaaggaggaatttcatgaaagttacttttaaaggaaaagaagttgaattaattggcacaccacctaaggttggcgatgaaatgcctaactttacagttttagacaaaaataagcaagaagttactaaagataatttgttaggtaaaaatactttaatcagcgttgtgccagacatcaacacttccgtttgcagtattcaaactaagacttttaacaaaacaatggatcagtttcctgacgttaactttttaactatttcaactaataccatcaaagaccaacaaaattggtgtgcggctgaaggtgttaaaaatatgcaattaatgtctgatgaaaaattatcttttggtaaagctactggcttactaataccagaatctggaatactagcacgcagtgtgtggattcttgagcctaacggtaaaatcgtttatcgtgaaattgttgatgaaattactcatgagcccgattataatactgctgtaaatgaattaaaaaagttgctgtaaaatttaaaaaagattgcctcagtacatacacatatgctaaggtaatcttttttttctacccaaagtcaagtattatcaatgatttaagaaaataaatttacttgttttaatgatgcgaataaggttaaagcaaataagagtttaaatttaagaaaaagcgaaagtaccacaaataagcctatgaatacttgtagtttttccataggttgcttatacttaagttgattatttgatttcagctaaagtcttttattttcggtggctatgttgtaatcatataattgatcatgtttgataagagcaaacattgtgcgtatcagtttatggactgatgcaatggcgattttcttatagccttgtctatttgaagatcgttttttcttgtcataataatcagttatatggcaaggctgcgtagcctttaccgtctccatttgagtaataactcgataaagtatttttctggcaatatgattgccatgcttggtaatgccaagagaactgtctttttcaccagattggtaccttcctggatcaatgccaacaaacgcatcaatttgagctgaagtgctaaaccgtcttagatcaccgagctctgctactaatctcactgctgtaattctagcaacccctgggatactcaaatagatggataaagcacgagcgtttactgctttagccagcttttccatgtagttaattacatagtcgcgttcttgctggagtgaaaataaattagaaatgttcctttgaatagctctaacgataatactatctttggaatcataaggataagcttctctagcaaaagcgtataatcttgtggttaagtaccgtgccctttgttgtcctattccagaaatagaattaagcatttgagttacctgtgtctcattcttttctagaacatatccagcatgtgggaaaagactaacaagcgcccaataaattctgccagatggatgagacagtatttcttcaatttgtgggaaagtggattggaggttgcggtgcaattgatttttagtagtaactatactcctagtaagttcttcataatagcgactggcattctgaagttcatgatactctctgggctgtggatcacgcagcttttgcggggcattaaattgaattaaagccaggcgataagcatctaccttatcagttttattatggcgtaaattattgtccattagctttttcgctttaagcggattaagcttcaaatacttaatatgataatcctctaagaaagcttgcaggcttagagaataaacaccagtagcttcgaaaacaactaaaggagttatcaaatattggttcagttgctcataaagtttttgatagccaaaggaatcattagagattctaaaagattcgccttgtttgatccggtcattaaccacacaaactgtggaagatttactgctaacatcaataccgaaaataatttgtgattccataatataacctccgctgtgaagataaacctctttatcaacctattaattctaattttctaaacacggcatctaagtgcccacagacttcgaagagacttaagaataggtggtaaagcagtccgtttcttttacgacatcaagtgtctaaaaagctgaagacttgatttgctttatcttcactttctattttagacaaaataaaaagtgccagatcgtgaatccgtcgattcatgatccaacactaggttagtatgtttctttagttcttatattgttccattctttgattaagttcttccttattaaaattatctaaattaattgcttttccacccattaaccaatcaatcatttcaggatctactttatctttaggcgtatcgtaataatcttgcaaagaccatacaccaccaatgtcatcaattattccataaccttttccagaaagtatctttggacacttaggagctgcttgatcagtagtgatgttcttaatatctacttcgaattcccagctatcgccataatcataagttaataataatttatctctcttttcaaaatacgaaaccttagctttttcataatctatgcctgtagccggatcccaatctttcgcttcagcgatactttctgcattttcaaagcgttcctgcgtttttttattcagcaaatcaaacatatgtccaaaatctgcattaaacatatctagcatagcaacttctaatgttttcactgacgtattgccactaataataaatctacgccaagtagatggtttaaaagactttagttttactctaatttcataggtagctcgattgcgagtttgattttcaaaaattgtcttttttcgtgttttctgctttttatcatgactctcaagatcttttcgcaagccttctaaaattctagacaaatcctgagaagacagatctaaatcttcaagttccaaaatctttttcggatttgcttcaattgccgctatcatatcgtttatcaaatcctcatccaggccttgatcggagtatgaattaatttcttcaactacccagtcaatattcatccctatttctttactatcagttttacgaataagacctactctactcaaaaatacatagaaatttttcaaagtatttgtaatctgctctatttctagcggatgtagtttattgttagatatcataatccataaataagaaatcgcttctcctaaatcattagtaactaaatggatcttattacgtaataaataatgatttagataatccggcagcatttgatcaggttggatatatcctattcctgctggtacatatttagcatattgatcaatgagtttttgattattttctttaattttagcaacaatcttttcattgccttttactggtttattttcatatttttcaaaattagagaaatcttcaaattttggcactaagtcaacatacttatatcttcgatttggtttttgcggcttaatagggaaatacgtactaacctcatcaatcatcttagaaataaaattttgtccaatctgactatccaaggcaaaaatagtcgctgacattacagttagcttatctacgatattcttttcatcttttacaacatcaatcaaatttaaatattcgctttgattatcctctataagtttacgaattttttctagcattaaactagcttggcttttagtatcgtaaaaagacatttgcttggactttaccgctgaaactaatttttgttgctgtttaaacaaaataaagtcatagcttttaatcgcattagcaaaaacatcattaaacagtttggtatcaagtttagttaataaaattggaaaactagtgtctttttcaactaataaatagtacttttgcttttgaatatttattacatctgcatcccaaacagtaaaaggctcattcttaataatatcaatcttattttctttaatttctggtgctaagttaataccgtatcgtactggaagcatgtggttctccttattaaaataatttcattttaattttatcatgtctattcacaactattcatctcagaagcaaaaaaatgaaggcaatcactgccttcatctaaaatacacaaattttagtcttcttctaaaaccggtactgtctttttatttctaacatgatatacaactaaaccaattgctaaacctaccagtgctggcactaaccatgataagcccatgctggcaagtggcaaatgatttctaagtgaagccactgctaaaccaaatgaactttgactaaccacacttgggaaagcaactaccatatcgcctaaagctggtacaacagtaaataggattacgaaaaagtaaactacacctgccttattaaacaatggtgaacaaactgatagcaagatcaaaaccatggataaaggatataagaacattaacatcggtgttgaccatgaaatgatttgatccaaaccaaagttagcggctaagaatgatgccaagcaactaagtgctaaccaaacgtggtaacttaccttaggaaaatgcttatgaaagtcttgcgcaaaagcagcaaccaaaccaactgcagtagtcaaacaggtaactgtcaataagaatgcaagtaaagcttgaccaaagacaccgccataaacgttaacgatttggttaaaggctaccccaccgttatcagaaactgcaaagcgtccgagagacattgcacccattaagatcaataacaagtagataaaaccgattgctaaaacggccaagacacctgatttagcaacaacttttgaaacacttttagcatctttttgtcccatgccacgaacagctgtaacaactgtaaccccaaaggctaagcctgctaaggcatccattgtgttataaccctctaagaagccatttactaatgctccatgcttataagcagcagttactgcagcagtttgtggattccccaacggacgagcaaaagctacaagaaacactaggaataataatgccaagaataatggatttaataccttaccaacgttagacaagatattattttgatgataagaaaaagcaaaagcagctaaaaagaataaagctgagaaaacaagtaaagcggaactttgcatattcttcggcataaatggtgcaataccaactgtgaaagaaatggttgcagttcttggggtaccaaacaatggtccgattgtggcatggattaaaaccataaatactactgcaaatccggcacccagcggcttaccgatgtcgtatactccgtttgcatgagtaattgctactgctaatacagataataatggcaataaaacccctgtgattaaaaagccaattgcagctgttccccaatttgctccagctagttgtcctaaatgtaatggaaaaattaggttaccagccccaaaaaataatccaaacagcaaggaagcaacaacgagataatttttccatgtaagttttttcgatgtatgatctgtcattttctctcctccaaaacatccctgataaacaaaaaagaccctcagctgcaaattgcaactgagggacgctttgagcgtggtaccaccctttatttatatcactattgctagcaatacctttcacgtacagtcaattacttgacgatacgtaggcactataatgggtgctcccactacttcttactttaagttaagaaatagaactcgaaagtgattttcatttaaacttaggatttatctcctcacacctaacgagactcgctgtaaattaagtctaaattactcttctttctctttgttttcagatttattaaatttgttaataactattttaatcaaaatataatcgttgtcaacaacttttttatttatttttcaaattttctattcaaattgagtctgccaattaggatcattatttgccgcaaaacacatggtaatttgttcctcagtatttcgcccaagtgaaagcttcggtaaattatctaatgcaaaataatcacaagcatcagtttcatcgttcggcttaaattcaccactaatttctttgcataagtaaaataccttcgtaatgttggtggccaaaattggtttattatgatgactacgatcttgaactgcaataattttgacgggtctaactactctacctgcttcttcatatgcctctttaacacaattttgtgctgtagtttggtcataatcattccagccgcctggcaatgaccattcctgagtcattttttcacggacaagcaaaattttattatccttaaaaattgctgctcgcgtatcaatcttaggtgtttgatagccctcatcacccaaaaagagtgttttaatttgttctttaggtagtcctgtcctagctgccatcatttcgcctgcaattttacggattttttcatagcgctcacgatcaaatacatcatgaccataatgcaatcctgcttgagctaaactttgtaaatctgtcgcccacttgataaattgatcatctgaattcatttttattgcctttaatataaaattctaagaaaaataacaaattccaaattaataggcagattgaaatacctattttagattttatcacaacccataagtaacttactcctagtgcaaaaattagtagcaatgttaacagattacgaatactaaatcgacattcactcttattatatacttgatttatagctaatgagaaataatataaggccattgaaaaaataatcaggaaaaataaaaaagttttgtttatattctgcacttgtaaatactgtattgctactgttgacaaaagtattgcgactacaattgcaatatgactatacattgaaataaagcctttacttatctggtgatgatcaattaattcatctgataagacaacatagcttgcaaacattaatactaaagataaaaacaaaaaagcagcataaactaacggtgtcttactattgaaataacttgtcaaattaacaatagcctcaccaaaggcaataattacgattaaacttactctctctaccaaatgaggaaaatttactcgttcagctttaaacatcccttttaaaaacaatggcaaaataaaaccaacaatataaccacttatacaaaaataaattccaacagggtagccgatgattaatcctacaataattaagataaattccaatcctaaaataattaaaaaggcttgtttatcattattatctgcttttacaaatagatactgacaaaataaaattaagatcataacagccattgcaatattaaaatagtgaaaagtaattcgccattcagtattaatattgttagccagataaactgctacaaacatatttaaaactaaaccgccaatatctaaaaatctgtttttgctatatcggttaaaatagataacttgataaagccaaatttgcattactacaattacaaccaataaaaattgaaaaaaagtaactaaaggaatactgccattaacaggatgatgaatcatcgcagtaattcgagaaattacatacacaaaaactaaatcatagaataattcaaacattccaacaggcttagcgattatttttttcaaactattccctcctaatatttgattactgtctatcatgctttatatttgtccaaaaagcaaattatgatattaatttggcaatctcagtttttagcttgattgtaaaaaattatgctaaagtaattattgattaataaattaatttaactggaggaatagccatgccacgaaatcccagaagacacaattttaatcagttctcagaccaagaaaaagataaattaaaaaatatcaaaaaagaattagctgaggcccaaaagaaagagcctgaaagtctacgtgaacatctacaagcctttaatgatggagtgatggcgattatcattacaattattgttttagaaattcaacctgctctgcatgaaattcattatcagcaattcattagcaacattgctgtctttttaatcactttttttattgtggcagacttctggtatgatctacatttatctttttcatactatattttcaaaccttcaaaagcgattgccattctagacttcttttttctagctgatttatcacttctgccagtcatgactaaatggattatggctgaaaattcttctttcgctgtagctaactttggaattgtttttttaattgccaaaatcttagaatatctaattcaatattttggtgctaaaaatactgcggaaactgtcaaatcttttgtgtaaatagttctttctcgtaaattgattttttaattatttatttaatcaaagtaggattctaaggtgtcctgaacctgaccaaagcctttatgaattcgattgaaataacggtcattgtagctcattgcctgaatgccaataaaagcatcaagcgactgttcagttggaaactctgccttaggcttagctttgcgcttgatcacattgttaaatgattcaatcatgttagtcgaataaattgaagctctgatctgcttgggatagttataaaagaccagcagatctggttctatgtctttcaagcttctgataacatggctgtaaaccttgccccatttggtatagaagtcatgcaggacagctgtggcttcttctttgtttgtctgttgatgcacctgtttgaattcgttcatgatcttttcacgatcgtcgacgcgtactttagcgcagatattgcgcatgacatgaaccaaacagcgttgaaaatgagctttaggataagtcctggccaaggctgttttcatgccaacaacaccatcagaaagaaaaagctcaacttgctttaagcctcgggatttcatgttttgaagcatatctgtccagacttcaatgttctcgctaggcgcaatgcagtagtcaatgacctccttgtgcccattaggcttgatgccaatggcaatatagactgcttcacgctcaaatgtttctcggcgcaaaggaaggtatgtcgcatccaaatagacgcagaaaaacttgtcgcttagcttgcgtttgtggtaagcctcaacctttggaatcatctgcttggaaatatttgatacctgggctggactgtaatggctgccatacatcttttcaattagatcggctatttccctggtggtcacgcccttggagtaaagcttgataatcatgctttccaagatatccgagtgctgcttgtagccaggcagcgtgtgctgatgaaattgaccgttgcgatcccgaggcacttgcacttcaattgggccaaattgcgtatcaactttgcggaaataagcaccatttctagagttgccagtattccagccatttctggcatagggatcatagcccagaaaggcagtcaattcagcttctaacaagttattaacagcctgttgtagctctttgcgcaataaatcatttattttgtctggattgaatagagcttgagcaaaatctttggtaaaatcattcatgaaggagttcttctttctgtatgtgtttttttgttcaaaccaatcatacgagaaaggaactcctttttctaatgtttaaagaaataaatttaaggaatcattcatccttacacaaactattttacagtctcatactgcgcgctattcccaaatcatgcgaattattattagccgctcctttattagaaaaatgacggttactttatttttaaatgtagtattgatcattctgtcattattcaatgccaaactagcaatgattctttatttaatagttccagttatttcatttctttttccagttaaacgcaacaaaattatgtgatttttatttaaaagagcgccagtaaacttaaactaaatctactggcgctcttttgttacttttcttgttccttgcaaacacattctttactatttaccattttgcagtggcaaatgccatccttatctgcacaaggacaatttttctgacatttcattttatcgtgacaaaattcatttttcatgtttatcacctctatagcttattatgcctatgataatcggactttccaaccaatatatcttacaattttacttttcctaataagattattttatagaaatacctagttaatttgttaatttaatctgctgatcagctaccgatgtaatgaagtaaggatcatgctcaattagtaacatcgttggcttcacactcttaagaagcttaattaattgatcttgattgaatacatctaaataatttgctggctcatcccataaatataaattagcaggttctgtcaatgacttagcccaagctactcgtttctgttgtcccatactcattttttcaattctagttgtaaaatcagcacgcgcaaatcccattttcttaagattgctcaacaaagcttcataagacaaatgatattttttagcaaagtcttttaatgatccgctatacattacaaattcttgtggtaaataagagattttcaaactttcaattagctcataattacctttggcaattagattttgagagatacccagtaaatacttaattaatgttgactttccagaaccatttttaccttcaatagcaataatttcatgattattcaaagacaaagtcaagcttttaaatagttctctactattttttagttgcaagctaagatcattaagttgcaaaatctcacgatgataatctgcctgaaaattcatagtcatagtaggaactttttcaatattctttagcattccttctttttctgcaatcctcttatccatgcgattgcgtgcattaatcgatttcttcatcatctttgcagcttgatgtccgatcgctcccttatttaatctgtttttgtttgtaaccgcttaaattaattattgacatttagctagttcagttttacgataaagttgaattaaataaatgttcttcgaggcaaggtgaaattccttaccggcggtgaagtccgcaacccgcgaaagcggtggaatccgataatcggtaccgatagtatagtctagatgatagaagaataataaccaataagtaacgcttatttgcgtttgccttgattatttgactttgaatattattactgaacctcgagaatactcgaggttcttttttgttctacgaggaagtgattttaatggaaaaagataatttttatatgaatttagctttagaagaagctaaaaaaggtcgctatcaaacatggaaaaatcctatggttggtgccgtaatcgttaaaaacggtcaagttttagctactggctatcatcaccattatggacaaaatcatgcagaacgcgatgccatttcaaaattaaccccagaacaattatttaattcaactctctatgtcactcttgagccatgcaaccattatggtaaacagcctccctgctcagatttaattatcaaaagtgggattaaacgtgttgtagttggacaaatcgatccacacaaattagttactggaaaaggaattgccaaactacaagagaatggagttcaagtaactactggtgttttagctgatgacgcaagtaaacttaataagttctacagctatttttaccaatatgggtttccctggatcacagtcaaagaagcaactagtttagataataaagttgcaatgcgcggtcagcgaactccaatcactaatcaagcagtgtatcagcaagtgcattctgaacgtgcagattatcaagcaattatgattggttcttcgactgctatcattgatgaccctattttaagaactaatgtcaaaagtgactatccgccaatccgtattatcattgatcgtcgcggacggctgttaaatcatttacgacttcgcttattaagtgatacaaatcccacttggattttcactcaaaataagcaaatgtctaaaaacaactttactaattctaaaatcaaaattattcatttagcaacaaacaagatccaagaagtatttgattatttgagtacaaaagaaatccagtcagtttatgtagaaggtggccctactttggaaaaagcaattatgaatgaaatttttgttaatgaagtaattaaatatacggcgccgatctttcttggagatgaaggcgtaacaggtttagtaccaaacgaaactgtccctttaacaaatgttaaaaaaacagcctttggcaacaatgaacgaattgcaggtgaattaaaacatgtttagtggtctagttcgcggggatgctcatattaaaaaaattgataaacacaagcaaacaattaagctaaccgtttcgtgccctgcagactttactaatgagctaacggtcggtgattcaattgcaattaatgggacttgtttgacggttgaaagttttactgaaactagttttgttgtaaccatgatgcctcagacttataagaaaactgtttttaagaatttgcataacggtgatcaacttaacgttgagcgttcattagaagtcggtcaacgtttagaaggtcatcttgttacgggacatatcgatgatttggcaacagttactaaaatagcacagaatgaaaatgcaattgaaatttggtttaagtttcctgcccgattatcaacacagatcgtacctcaaggtagtattgctttaaatggcgtttcattaacagtgatggatgttaaagataacagtttttcggtaggtctaattccacatactcaagacgaaactaatttagccaacttacagataaatgatgaagtaaatttggaaaccgacattatcggaaaatatgttgcaaaaaatttagaaaagagaaattaaaatggatgttagaaaaattcaaaatgcaattcaatggatgaaaaatggtggtttagtgattgttgctgatgatgaagatcgtgaatctgaaggtgatatgatcggcttagggtctaaagttactcctgaaaatgttaactttatgaccaaacatgctcgtggcttactttgcacccctgtaagtaaaacaattgcccaacgtttaaatttctaccaaatggaacaaaataatactgatccatacggtacagcttttacaatcagtgttgattacaaaaccaccactacaggtatttctgcttatgatcgtgcggcaactatcaaggcaattgctgatcctacttccaagccagaagacttctttagaccaggtcactgttttccattagtcgctaaaggtgatcaaatcaagaatcgtaatggtcacacagaagcttctattgccttagctcatcttgctggcgaaccagaagttgcatatatttgtgaagttatgaaagctgatggccatatggctcgtcgtccccaactgaaagaaattgctaaagaatatcacttaccatttttaacaattgcagaactacaagaatatattaatagtcctgtgagtaaacgctcagagtttgtaaattttcccactaaatatggcaatttcaaaattaaggctttcgccaatgaaaacttagctattattaaaggaaagattgatcctaaaaagccagttttagtacgtcttcattcagaatgccttactggtgatacgtttggctcaatgcgctgcgattgcggtgatcaattacatactgccatgaagcaaatgaataaaaatggtagtggcataattctttatttacgacaagaaggacgtggaattggattaattaacaaattaaaagcttatggtttacaggaccaaggttatgacacttatgaagcaaatgaaattttaggttttaagccagatgaacgaaattatattattgctgccaagattttaaaagatctaggtattagtcatatcaatttgcttactaataatcctgataaaattgatcaactagaaaataacggtattactattgaaaaaagaattcccttggaaattcctgctaataaggtaaatcatgactatttagaaactaaacgagataaattccatcatttattagaagcactatagtgaggaacacagaaatgaatatttatgaaggaaattttaaaaacaataattatcacgttgcaattgtagcatccaagtttaacgaaaccgttacccatcatttagttgacggtgctattgctactttaaagcaatttggagtacttgaagatcagatcgatatctattgggtcccaggtgcttttgaaattggttttactgctaataagcttctcaattcaaataactacgatggtattatgactttaggcgctgtcattaaaggtgagactgatcattacagcatgattattcagaatgttacaaacgcaattatgcagatgaatcttaaagcagaagtcccaataacttttggtattttaaccactgagaatattgatcaagccttgcaacgatccggcttaaaagctggcaatgaaggttcctctactgctcagagtctattagaaatgatttcgctaaataaacaaataaagtaatagagtagagggagattaattctcgcccctctcattgcaccggacgtacggttccgtatccggcgctacgtttgtaatcatctacgagataaatagtattctagcggatcgaccaagcctgggcgatccgctttgcttatgcccaatacttttgggctaagcaaaaagttaacaacatgtccggtactgcgtttataccaacctaatcgcgtattagctactttatgaatatcttcgtcgctaaaattgcactttaatgccttgttaatccgcattaaattagtgtatattcttcttggcagtttccattgtttaatgattactacccgtatcttatggcgcagccattgactgaatttaaatagaaagtatttcataccgccaattttaaagtagttaatccaacctctgaccacttgatttaccttagtaaagactaacgatagaggttgagcagctgctttcctgcgacaaagaagctctctaatcttgttataaagcttggacaggattggcgaaagcggtccgccttgaggcacgccaatcttattgggcttaaccaaaccatcttccatgataccggattttaagaatgaccgaatcaaatggagggtggttttgtcatttactcgttctctaattattgaaattaatttatcatgattgaccgtgtcaaaatatttctcaatatctaaatcaattacccattgatatccatcatcttcatgattgcgtatttaatttctgcttgatgctttctgaaatagctatcaagttcttcaaccattcttttatctactcccggagcacctttattaatcttgactctatgaatcgcttctttaagattgctctgacttagaatctgttcaattaatttcatctcgtaatatctccatttctacttgtaaatttattcagaatcatcccaattgctttcaccatcaaagagttacgttctctttgtgctaggctatcctcttattcggactatctgaacattgcttatagcgggatatgctcttacaaacattaggtccttcgctccagtctcattacaagactttcaacactactatgacctcagctgacttcttgcgactaacctttttcgaccaggcttacgatcgctgatgttaaagcttgctcagcttgcctgtccgcaagatctctcggggtaagacattcatctttgattttccactgcctcctggtttaccgtcttgactttacgtttgtcttttggacttcgacttgtatcgcagccttatccgccatttggcctaaccaggtttctgtacgtaggctcggaaaactcgctagccacttccttcacccatagcgtcaccgctatcggcttgtggttcactacacttggcgacaaatacccgtggtccaaactttcattggattagatgaaatgtcatgcccgacacacaagtaaaaagccaccgaagcactaatacgcttggtgactcaaaggtctaattataagtttcttctactagtagctcatatggctttagcaagtaggtagctcccgtttctttgataggataattttgcacaacaacttttttgcgggaaatatgataattaattcttcctgaattgtcaaattaagtgcaacagttaggttatgaagagatatattgcttgaagagttcttctgctgtctgatattggaggattcggcgatatttgtggttaatggcattggttgcctgttgaacataagcttttgacttgtctttcatgtgcttgcccgatagtcaggaatcttgataactacttcaaagcgtgtggttctttcagtcaaagtcattaaagcaggctgattcttgcgtctgacgcctttaaccagatctccttcccagtgcagcggagcttttctgtcttcaatctctttaggacgctgttcaatggaattgccaagatgcttcttgtgcaaagcgtgaccgccatggctgtgatgacgcttgttcctgcgtcttttgagcttcataggcagatcaatattgcttatgtccagcaagccctgatcaatatagcgatagacagttggtgtgctgggacaagggtagcctggcatagtccttttgaattcaccaacgaactcatcgatgctggtggcatcaaatttagctttaaagcgtctggagagcattctcaaaaagacagcataatgcttcaatggattgcgctgatagcagtttttgcgacgcttctcataataaatctgtgcagtatcagcgtaatagtgctcatacaataaatagctgctgtctctttgcaggacacttccgcgtttgatttcgcgactgattgtcgacttatggcagccgacttcttgagcgataacagtacgggaagttatgccggaatccagcattgcttgaatttgtccacgttgtacgctggttaattgatgatagtgcttagaaatgctagaatttgaattggtcataaagatcttcctttcttgatttttcgtcacttcaagtttaggtcttcatggcctttttgtttaacacttagtgttgcacttcaattttaaatccgggaattatttttttagttaaatttgatgtaatatcagacaataaagaaatttttcctactccacgcatcccgtaaataatcgatatttgataacatcttcaaatgattcaactacattttcgactactttgtttctccctaaatatatttggggaactttaccaaagttagtatcaaatagatttttggcttctatagtttttcctccattttaaatttcttcagattttttgattttattttagatctaattacataataaaaagtaagctattacacttgctaaaatgaaatctaaactatttattacattgcttctcctattatgaaatgcttttaatgtctaattttgcttttttccatatcccagcaggtccaagccagcaataaaataatcagtacaataatagcataagcgaaaatcttggcatcttgcttaggcattatattaaatgaaacaaaggttgccggcaaattatataagttcaagaaaattaaaataatcgagctgatccagcctaagaccgaccagcttctcctatttttgaattgccccatcattcttttatcatcagtcataattaataatggaacaatcgaaaatgggacagcaaaagctaagaagacttgtgaattttctaaaagcatgttgagagcaaagtgctgctgagaaattgtgtcgttagctgtcataacaacgcaaatgataactggaattacggataatagccgagtaaataatcgtctcgcccaaagtggcatcttcaagtgaatgaagccttccattacaatctgaccagttaaagtccctgtaatagtagaattttgtcctgaagcaagaagtgctatggcaaagagaactgataaaattccagttttagctactgaaatcaaaattggattacttagcattgcagtattgcttaaagcatcataaagtccaaaaaatgaactatctttaaccgctccacttttaaaaacagctgctcccataattagcaaaagcacgttaacaaagaatgctagaataagttgaatatttgaatcccaagtagtaaaacgaactgcatttttgacatcatctggatcatgatgatttatctttcttgtttggcaaattgaagaatgcaaataaaagttatgcggcatcacagtggcaccaataatacctaaactacctgttaacggggaaagcccattaaccacgggatgttgtgcaactagttcgggactcggaaaaacagacaagaagatcttactccaattgggctctgctaacatgacttgataggcaaaaacaaataaaatcaccataatcaaacatgaaatcaaagcctctatttttctgaaaccaacctttgacaataataatagtagaaacacatcaaaaatagtgataaatgttgctataactagtggaattttaaataaaaggtttaaggcaatagctgcaccaataacttccgccacatctgttgccataattgctaattcaattacaatccaaagaataaagctcaatctcttactagttctagcacgaattgcctgcgctaaatccatttgcgtaacaattcctaatttagccgacatatattgcaacagcatggccattaaactggaaattaaaatagtagaaatcagtaaaaagttaaagctctgtccaccattgattgaagcagcccaattgcctgggtccatataacctacagcaactaatgcgccaggtcccgtataagcaaaaagcattctaaagaaattcttagttttaggaaccgcaatcgtactattaatctcagctagcgatttaccattagcatatgaaataaaactatgattttccatcaatggtgctcctatccatggattcctagtgtcattcgagcaatacgcgacatcatatttggattccattgcggataccagaccagtttaatttgacaatcatcgatttccgcaacgctctctgctgccttggtaatttcgttattcagccattcactcacaggacatcccataatagttagtgtcatcgtaatctggcaaagatgatcatttacctcaatgccataaatcaagcctaagtcaacaatatcaacttgcaattctggatcaattacatcttttaatgcctggtaaacatctttttcttgatcagataaattttctatttctaacattaaccaattgctccttccatttggaagctgatcaatcgattaagctcaacagcgtattccattggcagctgcttggtgaacggttcaacaaatcccataataatcatttcagtggcttttctttctgaaataccgcgactttccaaataatacaattgatcttcagaaattttagaaactgttgcctcatgttccatcgccacatttgagttttcaatcgcattagttgggatggtatctgaagatgattgatcatccataataatcgtgtcacattcaacatgcgccttagaaccgtccgactttttagaaaacttaacacttcctcgataatcagttgagccaccgcctttggcaattgacttagaaacaattgagctagaagtgttaggggcattatgaaacatccctgctccagaatcttgatgaatcccgtggtgtgccactgcaatcgaaagcatggtaccacgtgctccttcaccatttagataaacgctcggatatttcatggtcaccttggcacctaaatttccgtcaacccattccatcgtagcatgcttgccagcaacggctcttttagtttccaaactataaacattatcagaccagttttggatagttgtataacggcaatatgcattgtccaacacatttacttcaaccacagccgcatgaagagagtcagatgaatattgtggtgcagtacatccctcaacataatcaaggtgtgcatcttgatcaacgataatcaaagttctttcgaattgaccagaattttccgcatttaatctaaagtaagcttgaacaggtgcagggacttgaactcccttaggtacataaataaaagtgccacctgaccaaacagcacagtttaaggcagaaaacttatttaaatcaattggaactaatttgccaaaatatttttttaataaatctggatattcctgcaatgcagtatcagtatctgtaaagataatccctaatttatcaaattgctctttcatcttgtgataaaccatctcagattcatactgggcagctgaaccagctaaatattttctttctgcttgtggtacacctaagcgttcaaaagtatccttaatatcctgtggtacatcattccaatcacgatattttttatcagtcattttttgataataaagcatatcatctaagtctaaacccgaaagatcaggaccaaaactaggcattggcattttttcataaatatggaaggcctttaatcgataatctaacatccacttgggctcatgcttttcagccgaaatttgtctaattacatcttctgttaaaccatgtcccgttgaaaattttggttttacattatcatgaaagccgaattgataatcttcatctttaactatttcttctgctttagtcattatcctcatcctcgttttctttaccaagtaatgctcgatctaatccccaccaagccaaggtggcacatttaatccgcgccgggaattccataatacttatcaagacttgagcgtcttctagtttttgcatgtcttgttcactacgttttttgccagctgctaagtctgaaaatatcctagaaaaactaatagcctgttcaatattttttccttttaccaattgggtcatcatactagctgaagccttactaatagtgcatccttccccatcaaaagcaatatctttaatttgatcattctcaaccaaaatagttaagtgaatcttatcaccacaagttggattataaacagtcgtttcattagtataattagcaagttgtccaaaattgcgtggagtttgagcatgatcgagaataactgctttatacaaactttttaatttatctaagctcaccgaaaaactcctttgcttcttgaattgaactaaccaattgatcaatatcattttttgtattatagattgagaaactagcacgtacagttgattctgtcttaaggctttccatcaatggttgtgcgcaatgatgccctgctctaacttctacaccatttaaatcaagtgctgttgctaaatcatgtggatgaatttttcttaaattaaaagaaatcacaccagtacgattactgcagtcttttggaccatacaccactaagtcatctatttttgataattcttttaaagcatatgctgttaaactatcctcatgtttttgaattaaagttaaatctaactttcctaaataatctattgcggcacctacgccgatcacgccagaaatattcggagttcctgcttcaaacttttgaggcacaggtgcccaggtagctccttttctagttacatttgtaatcatttcaccaccaaaacgataaggcggcatttgttctaacagagcttttttgccataaagcacacctactccagttggcgcaaacattttatgtcctgaaaatgcataaaagtcagcatctaaatcagtcacattaaccggaaagtgtccgacggcttgagcgccatctactacaacaatcgcgccatttttatgagctaagcttgttaaagccgcaataggattaattgtccccaaaacattgcttacatgagtaatcgctacaattttagtttttgtagtaattttactttttgcatcttccagatctaaacgaccattagcatcaatttcaataaactttaacttagcgttctttcttaaagcaatctgctgccaaggcaaaaaattgctatgatgttccataattgaaacaacaatttcatccccagcttggatattttgctcaccataagttgccgcaactaagttcaaactatctgtgcaaccactagtaaatacaatttcacttgcatttttggcaccaataaagtcagctactttttgacgggcattttcatatttttgtgtagcccttagccctaaagtatgaacaccgcggtgaacattagcgcgatcaaaattagtaaaatgttcaatctgtttttctacaactaacggcatttgactagttgctgcattatcaagatagatcaatttttcatcattaattttttgattaagaattggaaaatctgctttaattttcttaacgtctagtttgtccatcaattaattttttttccaaaatatcaatcatcttttgccgaacttccttattaggaattgcatcaagaacagcccctaagaacccgcgaattaccaatctttgagcttgatcatatggaataccacgactcattaaataattcatttgaatttgatcaacaggacccacactagccgcatgagcagcaataacatcattttcatcaattaaaagcagtgggttggcatctccatgtgcattatcagacatcattaaaactctattttgttgatcagccttagagccatgtgcaccatgaacaatctgaccaattccattaaaaattagttgagaattttcaagtaaaacaccacgttgatttatcaaaccagttgaatgtggcccgcggttggttactcggttgttaataccgactctttgatcaccagttgtaactgcaattgccttagaatccgcataactgccttcgccaattaattctgaatccaaatcgcctaaggtgttgcagtcattcataaaagcaattgcccattcaacatgtgcatcattttcaattcttgcacggcgattaaagtaaagcgttgtatccttatccatttcatcaagggatgaaaattcaacatgactacctggatgtgcaacgatttccaccattaagtttgcggatttaactgctttatcctcattttgaatttcttccaagaatttcacttgactgttatcctccgtaacaatcaataaatgtgaaatatatggatcttgcgtagggttcaaagtaactgtaattggttcggctaaaactgtatttttaggaatataaagaaataagcctgaatttaaatacgcataatgataagccgttaatttatcttcatcatttttaataacggaagctaatgcggatttaactaaatctggatattgctttattgctgtaaaaagatcgcataagatgattcccttatcgttaagaagatcatgattctctttttttataaaaaagtcaggttggttttgccacttaaaatcttctttagcaatcaacggccaatcttgataggaaaaacgctgcattttgggataagaaagtttatgcatcttttcaaaagaactagtccttaaatcagttaaccaggaaggctcgttgttttcctttgatgagacaagtatgttttctttgctcaacatttgacgttttcccccctaattttcatcaactaacttaatatgtaacccaagttcatcgcgaagacctgcatatccttctttttcaagttttttagctaaatctggtccaccgtctttaacaatacgtccatccatcatgacatgaaccacgtcaggcacaatataatcaagcaaacgctggtagtgtgtaatcattaaagcaccaaagttgtcaccgcgcatggcattaactccccgtgatacaactcttaaggcatcaatatctagacctgagtcgatttcatcaagaatgccaaaacttggtttaatcattaacatctgcaaaatttcgttacgtttcttttcaccgccagaaaagccctcattcagataacgctcggtcatggcttccttcatatctagcaaatccagatttttatctaattcattcaaaaaagtcatcactgaaatcggatcatcttttggtcggcgagcattaattgctacccgcaaaaattcagcattagtcacgccaggaacttctgctggatactgcatagctaaaaataatccttttctagcgcgttcatcaactggcatgttaataatgctttcaccgtttagcaaaatatcgccttgcgttatgtgatagcgaggattccccatgatagtctcagataaagttgattttcctgttccattaggtcccataattgcatgaatttcacctgtcttgagagttaggttcacgcctttaagaatctttttactcgtttttttatctttgtcttcaacttctacatgtaaatccttgatctctaaagttgccatttaaatcctctttttctacatttggtattgctgcttaactatcaaatacaacatatagataatataacgcaaaaaaaattttattttcagtcttgacttttaacctaacatgtttgcgtagtcgaaactgtcaaatcttttgtgtaaatagttctttctcgcaaattgattttttaattatttattcaaaataagattctaaggtatcctgaacctgaccaaagcctttatgaattcggttgaaatagcggtcattgtagctcattgcctggatgccaataaatgcatcaagcgactgttcagttggaaattctgccttaggcttagctttacgcttgatgacgttgttaaaggattcaatcatattggttgaataaattgaagctctgatttgtttgggataattgtagaagaccagcagatcgggctcaatttccttcaaacctttgatgacattgctataagctttattccatctggcatagaatttgtgcaagacagctgcagcttcttttttgcttgtctgttgatgtatctgcttgaattcgttcatgatcttttcgcggtcatccacccggactttagcacagatattgcgcatgacatgaaccaagcagcgttgaaaatgagctttaggataagtcctggccaaggctgttttcatgccaacaacaccatcagaaagaaaaagctcaacttgctttaagcctcgggatttcatgttttgaagcatatctgtccagacttcaatgttctcgctaggtgcaatgcagtagtcaatgacctccttgtgcccattaggcttgatgccaatggcaatatagactgcttcacgctcaaacgtttctcggcgcaaaggaaggtatgtcgcatccaaatagacacagaaaaacttgtcgcttagcttgcgcttgtgataagcctcaaccttggggagcatctgcttggaaatatttgatacttgagctggactataatgactgccatacattttctcaatcaagtcagcgatttctctggtagttacgcctttggagtagagcttgataatcgtgctttccaaaacatcagagtgctgcttgtagtcaggcagcgtgtgctgatgaaactgaccgttgcggtctcgaggcacttgcacttcaattggtccaaactgggtatcaaccttgcggaaataagcaccatttctagaattgccagtattccagccatttctggcatagggatcatagcctagaaaggcagtcaactcagcttctagcaagttattaacagcctgttgtagctctttgcgcaataaatcatttattttgtctggattgaatagagcttgagcaaaatctttggtaaaatcattcatgaaggagttcttctttctgtatgtgtttttttgttcaaaccaatcatacgagaaaggaactcctttttctaatgtttaaagaaacaaatttaaggaatcattcatccttacacaaactattttacagtctcgcgtagtcatgaactggcacttgaagtgttaaatcagaaattagaaatgtaacacaagtgttgacatagttgtattcactatcggctgcacgacgtccaggaaatggaataaatacttttccattaactactcttgaacgacatgcaccacaaacgcctgagcgacatgatgaaggggcaataatacctgctctttccattgccaccagcaaactttcatcacttcttgctggaataacttgtatttgatcacgggttttaactgtcatgttgaaagtcttattctttgcttcctcaggataattcttgaaaaagtatggatttactgaaccggacatttcttgtcttacttgccctggacgaagatctaactttttaatttcttgatttacaaaatgaatcatcgcagctggaccactcatataaatagaataattcttatctgctggagcatatttttcaatgatggcctgattgataaagccatgttcatatccttctcgtattatataaattaaatcgtattatataaattaaatcagtgataatgattattcttttagtttgtttattcgatcatcagatgctagtctctaattgtcattgaccttggtcaattggtataggttgtttccttctgtagctttgactacttttttagtctgccgcccaagcagttttactaatgacttactcacatgctgtatcgattctggctattactgattcagagcagattcagtcgcagctttttagcttgaacctatgaatacttatattttgcgagattgtcttagaatctgtaattagggactaacatgtgatgatcgatctatgaccaaatatttgctagaaaggaggccattctcaatgaaactttttatcggaattgacgttagttcaaaagatcttcaagtcgctattactgactcagaaaattatcaaaaacctttacttaaccaatctttttctaatgacctgattggtgctaatgaggtcaaaaagataattcttcaacttgctaaacagaacagctatgacaaagtaattatcggcatggaagccacttcaatctatagctttcaccctgcttatttctttgccaatgacgaagatttacaaaaaattaatcttgaaactgatgtcattaatcctaaaaacactaaacgatttcatgacgtttacgaagaaaataagaatgatcctactgatgcctattacatcgctgaatacttacgctttggtaaataccatgtcactattgctcggcaagaggaatacttagctttacagcgtttaactagagctagatatgaaatcacatcttcgctcactagagctaagcagcacttcattgaaactctttattatcgtgtaaacaaactagttaccgttgacaaagacaatattaaaacttctatctttggcgcaacgatgctgtcaattgttactgatagtaaaaccatcgatgaaatcgctgaaatgccaatcgaggatctaattgactaccttcaaaccaaaggacgtggccgcttctctgatccagagactttagctaaagcgatcagaaaagccgttagaggatcatatcgcttaggtaaagtcatgaaagactcgattgatgccgtattatctgtttactatgccgaaattaaaactaatcagaaattgattaagaacttagataaagcaattacagatatcgtccaaacgcttcctgaagagagaatactacaatctattccaggaattgggtcagtttattccgctggtattatcgctgaaatcggcagtattgatcgctttgacactgaagcacagctagctaaatacgctggtctagcttggcgtcaaaagcaatctagtaattttgatagcgaacacaaaccgatgactaaaaacggaaatcattatctaagatattatttggttgaagctgccaacctgattagacaaagagatcccgtttttcggaagtactatcaaaagaaatacgatgaagctttctattctccgcataaacgcgcttgcgttctttgtgcaagaaaattaaccaggaccattttcactctgctcaaaaatggtcaaatctatcaaacaccgaggtgattaattggtctaaaacatttttggaggagtaaataatagttgttaaaaaatcccttgaaatagggcttagtttcatgcacgcaaattttggttttaaaacaaactaattaaaaataaaatttaacttttacattgacttattaccacatgactacttcttcatcacttaatatgttaacgaccttgaccttatcagttttggcagcaattctatctaattcatcacccaacaaaatatggttgtgcgttctacttccatataaaataatcaaatttgcatcaattgtgccatcagcaattgcaccagccattgagtaaaatggtgtaataccgctgccaccagcaataatggtcttcttgtctcttaatggttcatagaataattgaccagcaggacccgaagcagctacttcagtgccaaccttccaattctcccaaatataaggagttacatacccatttttgactaacttaattgtgagcatatattcgccagaaagcgcctgcttaggtgtgcttgaaatggcataagcacgtgtacaataacttttaccaatatgaagttttaaagaaatatattgacctgcttggaaatatgcaagtttgctggtaccttttgattcatctggtacaaatacaaagctcttagcatcgtcacggtcaataatcttagtgattttcaaatattgcgtttcaggatgaagctcctcttcaagaatgttcatcggatattttttaggcaactctgcatccgaagcattttgaatttcatgttttcgctcattttgaagcttctttaaatcaataattcccttaatctcttcaaatttattcatgatctgctcccatattattaatatcactaacagctatttttgctgcagttaaaccagtagtgtatgaaacattgtaaccatcacacataaatccatgacccccgcagaaatataaatgtggcagtggatttacaacgttctttaaatccattgatctaccaataatttgatcccatggtgcacaatgatagccataaatttcaccatcaggtgttcccatatagcgagcaaatgttggtggtgcagcaattgcaatctcttctatagaatcactaattttaatacctgttgcctgttcatactcatcaatagcatttttagctattttaactttaagtttttcataatctttgggtttaacattatcccaaacaccatcatcaactaatttagtaatgtagcaaacactagttcccttaggagaagcatttggaatgacagtatttaagcaattcatgatcataaaatcatttttatccatagttttacaattttcatattgttttctagtatcacctgttgaagcaatgaacacactatagtcatttattccaagttctcgacaggatttatttagcccaagatacaccaaaaaggcactggttcctaatttatgtgagtttgcatattttaaagcatactcaggaatacacttttgatccatcatgttgccataaactgcgtgaggagtaattccacaaataacttccttagcaaaaactttttcacctttaatttgcacaccaacagcttgaccattttcaactaagattttttctacagttgtactcagccaaacatcaccaccattatcataaattacttgtgccaatgctgttgacatatcatgacttcttctttgaggaatataggcatcgttttctacataagtagctaacatagtggcaaaatacggaaattcaaattcatcagtgggaatatcaatgtaacaccaatatgctccaagaatttgttgagcttttttaggaagttttaatttgttaagcacatcatcccaactcttagtagcatactcgataaaagctggatatttttttataacttcttttttatcctttccatctgctatttctgctaacgcattcatactttgctcacacagatcaaaaagcttttccatcttttctgaagtacctggtacatatttttccatcgcattaataaaattttctctaccagctggcatcttaacatcaaatccgtctttaccataaataatatagcgataagtatctggtaattcttgcatttttacgttggcacctaaccagtcatacatttttcgtactgcacgcggattatcagcatgaccatattcacataattcatgcaaggctacttcaaactcaaatctgccgcgaataaaactggttgctgctccaccagccagattatgtctttcaatcaatagagtttttttgcccattctagcagaacttgcggcggccattaagccgccattgccagccccaactacgataacatcatatttttcagccattttttaaccctttcgttttcaaatgattacgttttcattataattaatatgaattaaaaaaaggatcaaagtaaagaaaaacaaagttattttatataaactagccgttggcttctggtcctaccagtgcaaaggagaataatatgaaatttcacccaataaatgtacccactgcaacagatttattcttcgttaatcaattaaaaacagcaatcttaacaggaaagtttaacctcggcgataaattacccagtgaaagagttttacaagaacaacttcaagtaagtcgaactgtgatcaattccggattaaaaaaattagcggcattacattttatagaaattcgtcctagatatggggcttttgtagcagattatcgtgtcgatggcgatttgcaaacaatgaacgaaattattaatttctacgggggacattaccgaatttcacttttaaattcgatttttgaaatcaggaaactaattgaaaatgatgttgttcgcttagattgtatagaacaggatgaacaatgcctgcaatcagctatttcaaatatgcaaaatcttgccaaagccaccaattccaaggacgctgcacaagaaatatttgcttatgtacatagtttagccttggcctccaagaattatgtttatcctttgcttatcaataactttaaatcaatctatttaactttaggtgaatggatctgtaatgaagtcgatgttaattctatttctgaagagaatctaaaattaattaaattaatcaaatcaggagataaaaatatagcaattgcttataataacaaactgattaattggagttacgagattttaactaagcaataaaaaaacggtcgatttgcttttcgaccatttttacgcacgttttgcgcgcgattatttatttaaaacatattttgtagatctaccctcaccaattctctcaacataaccttgctttgttagttgtttaagtagatttaaaacttttgttttaccaaaattacttgctcgactaatttgtgtagaagtatttgcaccctcgcgaatggttctaaatactttcttttcatcatcgcttaaatcatcagtaataaattttagaattggtaaaattatttttattgaattttcaaagatctcgaactgtggttgaactaaacttccttgataggaatctttaattctctttattcctgtaccaaattgttcaattaaacccaatctaaaaaagacattagccacaataggatttcttaaaatagaaatttgacctgacagatactcatctttactcaagttatgaggtaatcctcctggagaaactacttctattcgattatcaaacatagaaactttaatttgagcattaatattccaagtcctatgaaccaaggcattagctattgcttcacgaaaagcttcttcaggaatttgacttataacgttacgagtaacaccatgtatttcctcacgctgataatactgccgatatttttgaatagtttggtcatactctttaagaattgattcattctcatagtttgccctatccagcataatattaatattttcaccaaagcgaacgacatcaatcccacgataatgatttttatctgctaataattcacccgcattagtatatccggcattcttctgttctagattaagagtaattagcacatcggatgtcaatttattaattcctagtttttcttttagtgccatttctaaaatattaaacgatagattttgatttgcagctgttaaactgtcataagtcttattttcgccaatcaaaattagttgtgataattctgttctatccacttcaattgaagcactatcatttcttttataagcttttgctttatataaatatggtggattatcgccctgttttaccgtcaacgtgactacattagttttatcatcaatctctaaattataatctggatgtggctggatggaatcatttattttattctctacatttaaacaaaaatcaattggattttttacaccaataattgttccgagactgtaaaatagtttgtgtaaggatgaatgattccttaaatttatttctttaaacattagaaaaaggagttcctttctcgtatgattggtttgaacaaaaaaacacatacagaaagaagaactccttcatgaatgattttaccaaagattttgctcaagctctattcaatccagacaaaataaatgatttattgcgcaaagagctacaacaggctgttaataacttgttagaagctgaattgactgcctttctgggctatgatccctatgccagaaatggctggaatactggcaactctagaaatggtgcttatttccgcaaagttgatacgcaatttggcccaattgaagtgcaagtgcctcgggatcgcaacggtcaatttcatcagcacacgctgcctggctacaagcagcactcggatatcttggaaagcatgattatcaagctttactccaagggcgtgaccaccagggaaatagccgatctaattgaaaagatgtatggcagccattacagtccagctcaggtatcaaatatttccaagcagatgattccaaaggttgaggcttaccacaaacgcaagctaagcgacaagtttttctgcgtctatttggatgcgacataccttcctttgcgccgagaaacatttgagcgtgaagcagtctatattgccattggcatcaagcctaatgggcacaaggaggtcattgactactgcattgcacctagcgagaacattgaagtctggacagatatgcttcaaaacatgaaatcccgaggcttaaagcaagttgagctttttctttctgatggtgttgttggcatgaaaacagccttggccaggacttatcctaaagctcattttcaacgctgtttggttcatgtcatgcgcaatatctgcgctaaagtacgcgtcgacgatcgtgaaaagatcatgaacgaattcaaacaggtgcatcaacagacaaacaaagaagaagccacagctgtcctgcatgacttctataccaaatggggcaaggtttacagccatgttatcagaagcttgaaagacatagaaccagatctgctggtcttttataactatcccaagcagatcagagcttcaatttattcgactaacatgattgaatcatttaacaatgtgatcaagcgcaaagctaagcctaaggcagagtttccaactgaacagtcgcttgatgcttttattggcattcaggcaatgagctacaatgaccgttatttcaatcgaattcataaaggctttggtcaggttcaggacaccttagaatcctactttgattaaataaataattaaaaaatcaatttacgagaaagatctatttacacaaaagatttgacagtttcattgttccatcatcctttataccaaatttaacttctcctgtaccataatttgcatacgcactaaccgtttttaaaaatgtgtttgtaagattctctttaaattctaaattctttgtttctctcacttaagtcaccttgccaatctattttatctacaattatactctttcgcacacaaaaaaacggtcgattttattttcgaccgtttttacgcacgctttgcgcgattatttatttttcgttcacgataatcaatgacttaattgcttcacgattgctcattgcttcgtatgcttcttggatatgatctaaatcaaaactcttagtaaatacttttcctgggttaatttttccatcaagaacagcttgtaaaagaacttctttatcaggcttagttactgaagcaataccaccgcgaagaccgacatttttccagaataattggtttgacttaggctctgcatgtggtacacctactctaccgattaccgcacctggacgagcaatttgaccagcttgttcaattgcactttcagcacctacacactctaagaatgcatcagcaccagcattttccttagttaaagccagtacatctttaactgcttgatcatcacgacttgaaacaatgtcagttgcaccaaattcttttcctaattgtgcacgatcatcgtggtgggataaaagaatgattttttcagcgcccaacaacttagcaccaataacaccggcaagaccaacggcaccatcaccgataactgcaacagtatcgcccttcttaacttcagcgtttaatgctgcgtggtaaccagttgccataacatctgacaatgtttgaagggatgccaattgatcatcagtataatctcctggcttaccgggaatcttaactaatccagagtttgctggttcatatttcataaattcggcttgatagccaccgttagtacccggcttcaaattcaagcaattgccttcaaaaccattaatacatgcaacacaatgaccatatccatgagtaagagactgtaaaatagtttgtgtaaggatgaataattccttaaatttatttctttaaacattagaaaaaggagttcctttctcgtatgattggtttgaacaaaaaaacacatacagaaagaagaactccttcatgaatgattttaccaaagattttgctcaagctctattcaatccagacaaaataaatgatttattgcgcaaagagctacaacaggctgttaataacttgctagaagctgagttaactgcctttctaggctatgatccctatgccagaaatggctggaatactggcaattctagaaatggtgcttatttccgcaaggttgatacccagtttggaccaattgaagtgcaagtgcctcgagaccgcaacggtcagtttcatcagcacacgctgcctgactacaagcagcactctgatgttttggaaagcacgattatcaagctctactccaaaggcgtaactaccagagaaatcgctgacttgattgagaaaatgtatggcagtcattatagtccagctcaagtatcaaatatttccaagcagatgctccccaaggttgaggcttatcacaagcgcaagctaagcgacaagtttttctgtgtctatttggatgcgacataccttcctttgcgccgagaaacgtttgagcgtgaagcagtatatattgccattggcattaaacctaatggacataaggaagtcattgactactgcattgctcctagtgagaacattgaagtctggacagagatgcttcaaaacatgaagtccagaggcttgaagcaagttgaactctttctttctgatggtgttgttggcatgaaaacagccttggccaggacttatcctaaagctcattttcaacgctgcctggttcatgtcatgcgcaatatctgtgctaaagtccgggtggatgaccgcgaaaagatcatgaacgaattcaagcagatacatcaacagacaagcaaaaaagaagctgcagctgtcttgcacaaattctatgccagatggaataaagcttatagcaatgtcatcaaaggtttgaaggaaattgagcccgatctgctggtcttctacaattatcccaaacaaatcagagcttcaatttattcaaccaatatgattgaatcctttaacaacgtcatcaagcgtaaagctaagcctaaggcagaatttccaactgaacagtcgcttgatgcatttattggcatccaggcaatgagctacaatgaccgctatttcaaccgaattcataaaggctttggtcaggttcaggataccttagaatcctattttgattaaataaatgattaaaaaatcaatttacgagaaagaactatttacacaaaagatttgacagtttcatgagtaaatggtacgagaacaaaatcatttggtttaatattagttacctcatcactaacttcttcaacgacaccaattgcctcatggccaattaaagacccactttcacgatcagcaattcctctaaaccaccataagtctgaaccacaaacacttgcacgtataacacgaataattgcttgattttcaccatcgatttttggctttggaacttctcttacttcaactttacctggttctacaaaaactgctgctttcatattatttctccttactatcgtttactttatatacatagtctaatcaaaacagactgtctataaaattactaatattaaatgctactattcaaaaaacgtatagtaatttcatttatgaaaaagaaccgcttgcttaaaacaaacggttctaactattagttacttattaatcttcatcagtattttggtgctcttgactgtcatttttttctttttcataatccttgtcatgatctttttcatcatcttcagtctcagtctttataatcttctgatttttagcatcaatttcaacttcggttttcttacctccatcttcaaattctactttccagattggctgatcatcatccatttctaatgaccattcaacaggttgacctgatacctgagtttgagccaattgagtagcttgctctcgagtcatcatattattaagatctaatgcttgcgcctcatcatctgaatctaatttttcagattcagcttttaaaatattgccattacttgcatcaatcttaactttgtattcattttgtgaatcaaaaccttcaatttcatacacatatgaattcttcttttgctctagttcaatctccttaattgattttgagccatacttttcataaaacttattaactgcatcttcttgagaaagattaatacttgcagtacctgtattactttgattttgttctgtgttattgctttgactctgttgcgtttgagtgccagtagaagcattagcctggttaatcgccaataaacttgcgccacccgctgctaagcctaatgcagctgctgccaatgatacttttttaatgttaaactttttcataattgaattcctcgcttttcgtattaattaactttgtacacttagtttacgaaaaaaggaacctttaaaaaccaagatttaatgtagatcaaatgaaattttcttcattttagagttttttctaattaaattgatttttcaataaatatcctatacgcgtggtgctagttaaatcgttctagacaatatgccatattataagctaaaatagctatttctagccgctgttgaaagcctactggacttcttgctcgattattctcagcgttgtaataactaagcaaagaaaagtcgctttcaatgcttcttctaattgccatcaattgatgatcattatgccttctagctccttgcatatttttacgatatggcgtccaaagcacatatcccatgtgctttagattagtagctagatttttgcttaaataaccttcatctcctaaaagataatggttggctggatgagcattgatcatcaattctactgtctctttggcatcatgtactgacgctttagtaactgcatagtcaagcagatagccatcatcgcttactattgcgtggaccttgaagccataataatagactttcttggttgctttataaccaatatcagctacgccccgaaagatcttgacacgataattgcgaacaggctggcaaactggcactgggaaactatcaataatcaaaaattctccagctgtctttacttcttgattccaagcctgacggatacaacgaattagaggcaagagcattcgagctcgacggttaaaacgagaatgagataagccaacgaagaatttacagaatcttcgttgagattcaattccaatttcagtttgccaaatgagcatcgctaagatagaactattaggaagcttggtctgatcaacatttttacgatgtttaagtccatcaggcgcataaagcttatacagcgagcgacaaatcacatttaaccgattaaaactaacttgtaaatggtgagaaaaacgcttaagcttgagatagttcaattagatcagactcttttctatttaaattacttacaacttgagtctagtctaattggacttttttattaactaaaacgatttaactagcaccacgcgtatcctataaatttgtctcttttttgacttgttctagagcctttacctgtgcttgatctaagggacgatactcattcatcttattaagtaattcagttaatttgttggtattcattttatcactctcgtgttcattagttgcttttgttaattcattttattatagaaccctcaataatcactaaaaggaatttcaaaaagatttagcgtattttatcacctttggaatttttctaattaaaaaagttattgacaaatttagaaagcggttttattctaagaatgaattaaataatgttcttcgaggcagggtgaaattcccgaccggcggtaaagtccgcaacccgcataagcggttgaatcctttaatggtaccgatagttagagtctagatggaagaagaataattttgctgtgctcttttctattttgatagtaggaactgtacttaaattattttttgaatgttagttagaacctcgaggtaattcttcgaggttctttttttgttctgttaggaagtgaaagaaatggaaaacagtgatgaagcatatatgcaattagctatccaagaagcgaaaaaaggactctatcaaacatggaagaaccccatggttggagctgtcatcgttaaagatggcaatatcttggctacaggtcatcatattcgttatggttattatcatgctgagcgtgatgctatttcaaaactaactccagaacaattatttaattcaaccctatacgttactctagaaccatgcagtcattatggtaagcagccaccctgctctgatttaattgtctctagcaaaattaaacgagtggtaattgcgcaagtagatccacatcaactagtaacgggtaaaggtattgccaagttaaggcaacacaatattcaagtaacggttggcgtattagaagatcaagcaaagaagctaaacaagttttatacttacttctaccaacataatcatccatggataacgttgaaacaggcggtcagcttagattatcgaattaatgaggctaaaaatattcgcactcaaataacaaatgaaactgtttatcagcgagtacatagagagcgcgcaaattatcaagccatcatgattggatcaaatactgccattatcgataatcctagtttactgactactgtcactacggattttccacccattcgaataatagtagatcgacgtggtagattactgaatcatttaaatattaagttattaacggataagttaagtccaacttggatttttactcaaaatacaagcttagctaagactccacataatgaaaatatctcaatttttttgatgaaaaacgcttcaatcaccgaagtcataaaaaaactgaccaatgaagagatccagtcggtttatgttgaaggtggtcctaccctagctaatgccttgctagccgaaggtcaagtaaacaatttaattacttacataagtccaattttacttggtcaaaaaggaaagctaggaatttcacccagctccaaaacaactttacataatttacgtgctgaaaagttggatgataattttagaattgaaggtgaaattaatgtttagtggtctagtacgcggcgacgcacgaattgctgctattgataaaaacgatgaaactattgttatgactgttgcttgccagcccgactttactaaaaacttgcaaattggcgattcaattgcagttaatggaacctgtttaactgttgagcaatacactgatacttcttttgtagtaacgatgatgccacaaacttatcagaaaactacttttaagaatttggatatcaatgcccaattaaatgttgaacgttcactacaggtcggacaaagattagaaggtcatctagttactggacatattgatgatattgccaaagttacggaaatcaggactaacgaaaatgctattgaagtttggtttgcctttcctactcgcttaaaaaatcagattgtagcacaaggtagtattgcaattaatggcgtatcgctaacagtaatggatacacatgataatgttttctcagttggattaattcctcatacacaagatgaaacaaatttaagtaagttaaatgtcggctcagaagtaaatattgagactgatatcttaagtaaatatgtcgctaaaaatttagaaaagagaatttaaaatggacgtaaaaaaaattcaaaatgcaattcaatggatgaaaaatggtggtttagtgattgttgctgatgatgaagatcgtgaatctgaaggtgatatgatcggcttagggtctaaagttactcctgaaaatgttaactttatgaccaaacatgctcgtggcttactttgcacccctgtaagcaaaacaattgcccaacgtttaaatttctaccaaatggaacaaaataatactgatccatatggtacagcttttacaatcagtgttgattacaaaaccaccactactggtatttctgcttatgatcgtgcggcaactatcaaggcaattgctgatcctacttccaagccagaagacttctttagaccaggtcactgttttccattagtcgctaaagatgatcaaatcaagaatcgtaatggtcacacagaagcctctattgccttagctcatcttgctggcgaaccagaagttgcatatatttgtgaagttatgaaagctgatggccatatggctcgtcgtccccaactgaaagaaattgctaaagaatatcacttaccatttttaacaattgcagaactacaagaatatattaatagtcctgtgagtaaacgctcagaatttgtaaaccttcctactaaatatggcaatttcaaaattaaggctttcgccaatgaaaacttagctattattaaaggaaagattgatcctaaaaagccagttttagtacgtcttcattcagaatgcctcactggtgatacgtttggctcaatgcgctgcgattgcggtgatcaattacatactgccatgaagcaaattaataaaaatggtagtggcataattctttatttacgacaagaaggacgcggaattggattaattaacaaattaaaagcttatggtttacaggaccaaggttatgacacttatgaagcaaatgaaattttaggttttaagccagatgaacgaaattatattattgctgccaagattttaaaagatctaggtattagtcatatcaatttgcttactaataatcctgataaaattgatcaattagaaaataacggtattactattgaaaaaagaattcccctggagattcctgctaatgaggtaaatcatgactatttagaaaccaaacgagataaattccatcatttattaggagcattatagtaaggaacacagaaatgaatatttacgaaggaaattttaaaaacaataattatcatatcgcaattgtcgcatctaagtttaacgaaattgttacccatcatttagttgatggtgctattgctagcttaaaacaatttggagtacttgaagatcagatcgatatctattgggtcccaggtgcttttgaaattggttttactgctaataagcttctcaattcaaataactacgatggtattatgactttaggcgctgtcattaaaggtgagactgatcattacagcatgattattcagaatgttacaaacgcaattatgcagatgaatcttaaagcagaagtcccaataacttttggtattttaaccactgagaatattgatcaagccttgcaacgatccggcttaaaagctggcaatgaaggttcctctactgctcagagtctattagaaatgatttcgctaaataaacaaataaagtaaatcaaaaagtgtctgggaaaaaactagcttccagatgaataaaaacgatcaagatttccttttttaagaatcttgatcgtttttttgttctctttaaaatttttaacaataaaaatcggcccttcagccaccttctttgacaatatttgttcaaattcatcatcataaaggcaattccgatatcggtttcgaccttctctttacctcgcaggtgcgttctgcgcatgccaaatacgttcttcaaatgtccgaaaactggctctacatcatattttctcatgccatagatgtgtctgccttcttcgctttggagaacttcttttgctttttcttttaaatattgccagttaggattatagcgaacttggcgctggcggccgctagctgttttagccaattgttccaattctggcgttagctggaactcgtctgcctcataaaccttaaaatcacggacctgaccagtagaacgatccttgcgctggctgtaatatttgaaattgaatctgacgccatgatgatcaatgtaataatcatctttttcattgtagtaccagttgattagcttagttggatcattcttatactttttggtctgttctttttcatacatagtgtagggaataaagtacttcttgtctggatatttttcctccagcatcgaataattgtattcactgccatagccagcatcggcgacgattttgtcaaacttgtccaacacggtcatttgatccaaaaccggctccaaagttttgaaatctgtcggattaggaaagatggcataatcaactacatattgatcggtcgtgactgcttgaatattgtagccaggctttaattgaccatttttcatgtggtcttccttcatatgcataaaggtggcgtcatgatctgttttggaataactgttgcgtccggcaaagatctcttcggcttcttcatatttttgcattcttggcacataatcttttcttagccggtgcagaatcttttttagtccacgtcgcttggcttttcgaggtgaaccgccaggaatggctttgttttcctgctcaatctctttagtcagcttgttaatttctgcttcagtttcttgagctaattcctttagcccctgactagtttgaactttttctttttccatttctttgactacttctttagtaatcaattcatcataaagttcaactgcctggcctttcagcttttcatgatacttttcaaccgctttgcgccagacaaatgtatagcggttagcatcagcttcaatcttagtaccatcgataaaagcagcaccttcattgattaagccttcatcttctaacaggttagtgaagtagataaagctctttttaatcagttcattggcatggctgcttgatctaaaattattgatagtatgatatgaaatcttttgctggtcagccaagatcatcattggcagattttcttccagcatcaactcaatctttctgccagaaaaaactcttctggagtaagcaaaaagcagtattttgagcatcatggctggatgataggctgggcggcccgttttagcagtcttgcctactaaaacatcttctggaattgaatctacaaaccagctgatgacattagccaaatgattggccggaatggcaaaatctagattaagtgttaaagcagtttgacctgtgatataattcttgtacatgttagtttccaccttttttattttgtgatgatttaataatatcaaggctggagctaaaagtatacaaaaagagcgttgaaacaaaaattcaacgttcttttttcatgatctgagacttagttttttcccagacacttttttgtaatattgaatatgctccttaatagtccaagaatatttaactagtactacgcttttgaattacctagttctgatcatcgttataaccaaaaatagttaggaactgtaagaacaggttgacaaaatctagatataactacaaggcacccagaactgctaagccattggttgaaacttctccaccaaattgtaagtaaatattcttcattctttgtgcatcccaagcggttaaaactgtaaaaataatcactgcaataaacgagaaaatgtaactaaccattgggttctttaagaacaaattaactaacatcgccacaatcaaaccaattaatgcagctgaagcatacgaaccccatctactcaagtcctttttagttaccgtcccgataattgccattgccacgaatacgctagccgaagcaacgaaggccgaagcaatatcttgccctgtataagcgcctgcaataaaggcaaaagtaattccataaataattgccgtaattatcaataaaataaagctggctactggagttcgagttgctctaaagttaatgacaaaggttaatgcgattggtaacaataatagcagccacatcgtccacggatgactaaccattaaggcaaccatctgcctagcaaaaacagtcatcgtaagataggcactcaaggcagaaacaaagacagccagtgccatatagccataaattttacttaaaaagacatttaaaccagatgcatcaactacatgacgacgacctggattttgatcgaactcatccatcagtatttcctccaatctgttagatttctttggttgcttttaatgtatcacttaccgagattaaagagaaatatgacggttcgagatttcttaattcagttttgcgaccaataaattgattcatgatttaaacccttcggtaatcttaattgctatacttaacaaaaaagagctaaagcaaaaatagagtagagggagttttataactcgcccctctcattgcaccggacgtacggttccgtatccggcgctacgtttgtgattatttacgagataaataatattctagcggatcgaccaagcctgggcgatccgctttgcttatgcccaatacttttgggctaagcagaaagttaatgacatgacccgtacttcttttataccaacctaagcgcgtattagctactttatgaatatcttcatcactaaaattgcactttagtgccttgttaatccgcattaagttaatgtatattcgttttggtagtttccattgtttaatgattaccacccgtactttatgacgcagccattgactgaacttaattagaaaatatttcatgtcgccaactctaaagtaattgacccagcctctaactacttgatttatcttagtaaagactagtgatagaggctgagcagctgcttttctgcgacagagaagttctctcatcttgtcataaagcttgattttgcggtcatctcctggctttgcttgccagtattcgccacttttccagaaggtaaagccaagaaagttgctcttggttggtcgtacaactttggttttggttgcgttgacctttaggaatagctttctttctagccatgatgaaattgaattcatcacacgtttggctgatttaccgcttttgacaaagatattgcagtcatcggcatagcggacaaagcgcaggcctctttgttccaattctttatccattttatctaaatagatattggatagaattggtgaaagagggccgccttgtggtacacctagtttattaggcttaacccaaccatcttccattactccagctttaagaaaggctcgaattaaatggagggtggttttgtcatttacttgctctctaattattgaaattaatttatcatgatttaccgtgtcaaagtatttctcaatatccaggtcaacaacccattgatagccttcgtttaaatattccaagacttgttcaatagcgtcatgagcactgcgtccaggtctaaagccatagctatgctcactaaaatgaggatcatagatcttcattaatacttgggcaatagcctgctggattactcggtcaacaaccgtgggtattcctaaaggacgtttcttaccattagctttaggaatgtagactctgcgaacagcttgcggacgatacttcatcttcatgatggcgtcctttatttctacttgatgctttttaaaatagctatcaagctcatcaactgttctcctgtctacaccaggcgctcccttattgattttgactctcctgattgcttccttgagattattttgacttaaaatctgttcaattagttccatctcgtgatatctccatttctacttgtaaatttattcagaattgtcccaattgctttcaccatcaaagagttacgttctctttgtgctaggctatcctcttatccggactgtctgaacattgcttatagcgagatatgctcttacaaacattaggcccttcgctccagtttcattacaaaaccttcagcactactacgacctcagctgacttctcgcgattaacctttttcgaccaggcttacgatcgctgatattaaagcttactcggtttcacctgtccacgagatctctcggggtaagacattcatctttaattttccactgccccctggtttaccgtcttggttttacggttgtcctttggactttaacttgtgctgcagtctcatccaccatttggcctgaccaggtttctgtacgtaggctcggaaaactcgctagccacttccttcacccatagcgtcaccgctaacggcttgtggttcgctacacttggcgacaactacccgtgatctagactttcactagactagacaaatgccatgcccgacacacaacaaaaatagagtcttcactgaagactctattgctttttgaatattaaattaatcagtttctctttctaaaagctgcaagactgaatattcctgcgattgcggcaaacacagccccaatagccgtcaacccagtttgtttttcaccagtttgtggcaaaacattcctttgtgtaactgctttttgaagtttaacttctttaacagataccgcacttaccttagaattggctaacttaactggtatttctttcttagtaaattgacatgatgacactttttcactctttggagcaacagtcttattctttgctactttatttattttactcgttttctttgtcttatttacccgctcagcttttggtggaatatttttttcttgcttgtctatcgtttcaggatgtggagccacattattttctgatggtgcagttggctgagttggagttgtcggttgagtcggagtttctggtacatcaggtgtatcaggctgtggtgcttttactggaaggatgtctacaacatagctattttcaatcttcatatctgattctttagaaccatttaatctataggaaactgtcacaatatatttaccggctggagtttgaccattaattttattaatcttatttctgaaaattgaaagcaccaaaatcaagctcaagtcctgtcactattgagctttcttagacgtaattagtttttatatgatctgtttcagtgcaatttgtatgaatcgtggcagttggttaataaagtcattgattacttcatctatcttttcaaaactattctgtttaagctcttttaattctgaaattaagtagaccaatgcatctacgaatctaatatcaggtaaggattcgttcattagatagaataaatctccgattgtcttatcatctgtattttgtctttcctgccaggtcaatagatcataagttattgctgtaactgcgatatagccacattggccatcatagctttgaacttgagatttatctaaagcaagatattgcttagacgtcttaaaatatgtttcaatttgccatctacgaccataaagttggatgatttcttcagggctaagctttgtctgagtagtagctaaaaccaaatacttgttcttgtttccacggttggagacaaagacgagctttaataaaaagttatgtccatgatattgagcctcaactatgcttgaataaagataatgtttctttttacggatgtttgaagcagccaaacgatcatacaagtctttaacgctatagcggcaatggcgataaatgtaataaatctttgaactcttcttgatcatgccaagtccatctaaaccgatcttctttaaaatccaaaacattcttggagaagaaaaccaagaatcgaataagacgtatttagcttctactcctaatcgtaaggcttgtctaatcaactctacagttacatcattcatctttctctgagcttgatttctccttttaccagaaattgaacgttcatcagcagtaatgggagcagctccaatcatatttttcttggttttggttgacatcaaggcaaagttaaccggcaagaaggtattgccatcgctccagcctaaagttaaaccacgatatccgttcaaatactcatgcttgtcatggtcatagactttagctagcaattcggtctttttagaaaaagaccgagccatcagcgtatcgtcaacgataaaagcaagtcggcgtcttttatcgataaatggttttaagcagccaatgagccgggctgcaatcaagcataatagtttttgccagttgattcttccatcgttaagtacattgcgagcagttctaacggaaaaacgtttgtcatccttagctctgaataaagaaagccgagcaaaatgtactgacatcagccaagagataatcatggttaatgaaacggtggatttacgcttaaaattgacttgtttagttaacttagctagaccaattagattaataaatgaagaaattaaggatttagtatcattttctgtgtcgatttgttctatactgttcattgcgcaggatctcctttactttttaggtcgacacttaaagtataacgcagagagatcctgcgtttttatttttgataagaaaaagccaagaggcgcggggaaggagcgttaatcttagctttcaagtttcagtcttatttcctttttcatcgatgatgccaaccaattgaacatcttgtgcattaactggaatattttctaataagtatccattatagacagcattaggatttcttacattaaatactccagttacaccttgatgataattccagtcttgcgcttctttagatccttggtttaaagtctcatctttagtagcgataatttaatgtacttcaacatagaaaattctcttattctgatcttctttattaagtccatgaataattaccttatgactggtatttgtatcataactataaaatggcattaaagtggttaaatctcttgcctgcggattcactgaatagccatatttatcaattacctgttgaatctttgataattgaatcttatagctaccaccctcataaaaagcttttccacttgtgtccaatatattaccagaattagtaatctgaataacttcaccaacttttggtaaactctcaataagttgtggtatattgacagcatcataactaccatcttgattcctagttaccaaactaattggagtattctgagcttcatcaactgtccaaagcttttttggttgtttatatgtgcgtacataaatactctggtcgttttgagcttttagatctatttcattgaattgatttcctgttggatcaatgatcaagggtacattcatttgcgcagtagtttcaccaggaataactcctctgaacccaatctgtcttacgttactaattgcggcagcgccaaagtttttcatcatttcttcataagaataccaagtaccattttgggccaagtaataaactgacaaagcattatcattaatcaccttaccatttttaataaagactacatttgctgccttagtactactgatttgcaaacttagtttttccttattggaataccatgcattgatcattaaaactgcttcatcattaggattagggttagagtcatttttactattaccaatcatttgatcagttttagaaacattttctagagttaagtgagcctcagggtcttgagcattttgctcaattaaaatggcattattattcttacctgcttctgcacttgaaactacttgagtctgattcgtgttcttgttcttagcggtaatagaataatcatacttaattgagccgtcagccggcacgttagttatattagcatttttaccttgtccatttgtttttagtccactagttgtattattttcaccgagaataattgcttgatcagttttatcctcagagtctaatttctgatacgcagctgatatttctgtcttaattttattttgatattgatcaccatttctttcaaccttttcaacagatgaactattttgagtagattgctgtttagattcaacagttagaacttgttctgacttttctggctgattagcagtagtctcagcagcatgtacttgacttccactaaaacccaaaaaagtcaatccaattaaaactgaagcagttccaatagttaattttctaatcgaatacgtttgtttttgatcaaatttatttttatctaacatttgaatcacccttatgtgaaaaataccgtttctcttttcgccattataataacacccgttgtaagtgccttcaaacattatgcataatttttaccaaacaaaaagcatgaccgaagccatgctttttatcttttatgtatctacttatttttgaactttttctatgatcatccgaataatatttaatataaacatccaagcaatgttataaatccaaatctcacagatcatccatagtgaaatccttggtacaaaccagcccaagtagcatgcacatgcagcaaaaatttgtgtaattacaattgcccagaaaagtattggagctggaaatggtctttcgaagaaccaacgagtttgacgagtaacaaacaatagtaagtgcccaccagcaactaattgcaagaacataattgtctgcaattgtgaaaggtttccaacttggaaaatgctaattgagccaggatttttaactgacatatatcctataaatagaagcaacattgattggattacagcaaatacacccaaaattgatgaagttgtaagaatcttcttcatctgccatctgattggcttcttagaaacataggtattgtcataagcaatagtcatgattggtaaatcatcaagtaatgacataaccacgatcataattgctgttaatggctggaagttcaataaaattgatgacaaaactaccaagaacataatgttcattgtcaaagcaacacgataaattgtgtaacttgtaattctggcaaaaatctttcttgcctctgtgattgcagtttgaataactgacaaaccgggtgaagttaaaattaaggcagcagcacttctagcagcatcagtagctccagcaaccgctgtaccacaatcagcttgcttcaaagcaggtgcatcgttgaccccatcaccagtcatcgctacaatatgaccttgcttttgcaaagttttaacaatcgcatatttatgttctgggaaaactctggcaaaaccatcagcttgcgcaatcaacttttccaaatcggctggaacatgatcaggatcaagattcttaggaaaaactttagtagcgttataaatattagtacccatgcctaactttttagcagtttcaatcgcaatcgcggtgtcatcaccagtaatcatcttgacactgataccttcacgcttacaatcatcaattgttttcttagaatcgtcccgaggtggatcgaacatcgacaatacaccaagaattgtccaagtcttgccttgatccttactttcagctacacctaaggcacgataccctctttttgctaaagcatcagtggtatctagaactttcttttggacatctggatcactacttaatttagctacaacctggggagcacccttaatagcccataattcttctttagtattattattaattaaatgagcttcaattcgcttagatactggatcaaatggaataaacttttccattgtccaatcagctaaaacactctgatctttcaaagctttaataactgcgttgtcaattggatcattatcttctttccttgaagctaaggcgccaattttaattacatcttgagcatctttagcgttaattaaagttgtatcacccaaggttaattgatttttggttaaagtaccagtcttatcactacataagatgtctaccccagccatttcttcaattgaagctagtctagaaacaatcgcctttttcttagataggttcaacgcacctaaagccaacgtaattgaaaagacagttggcattgcgacaggaatagaagcaaccataattaccgctaaaactacggcaacgataattaagaaattaccaatcttaaacattgcttcttgagcaggacttttaccaccagctgaagcaactaatttagcagttttaccaaagaaagtattagagccagttgcaataacaacaccggtcatctcaccttttttaacaatactgccagagtaggcctcatcaccaacttttttagttactggcaaactttcaccagttaaggcagcttgatcaattgaagcgtagtcccaagcgcaaatctgctggtacgatttgccctagccgaattttaacaatatcgcctggaactaatttgcttgcatcaatcgtttcaaatttaccatcacgtaaaactgtagcagttggagctaagcccttcttccacgctgctaacgcatttgacgctttacgagattgccaaaattcaatacaggcattgaacaacagcaatacaataataatgaaaaagtcatcccagtggccaataattgcagaaataattgcagctgcttcaatcatataagcaattggaccagtaaagtcttcaaaaactttagccccattggttcctgcttagcagtaatggcattcggtccgtacttttgcaagcgagcctgagcctcttgagaagtcaaccctttttgtggatcaacttttaacttttttaccacatcttgaatatcatctttttcaagatctgtcttctcttgtttactcattattctgacctctctactttattaaacactcagatctagttttagtataaaactatttcagaataatgtttaagagaaagccttacaaatttgtcattatacgataaaaaaacaattattaaaatatggttattttattttcaagtagctaatgaccttatgaaggcaatctagattccttatttctctgcaaaaattgtttttcagcgagaaattttgcaaaaaacacagccaaaatgtatcactaggtttggttatatattttttctataaaaagatttattttttagcccggatttaaaattgaagtgcaacactaagtgttaaacaaaaaggccatgaagacctaaacttgaagtgacgaaaaatcaagaaaggaagatctttatgaccaattcaaattctagcatttctaagcactatcatcaattaaccagcgtacaacgtggacaaattcaagcaatgctggattccggcataacttcccgtactgttatcgctcaagaagttggctgccataagtcgacaatcagtcgcgaaatcaaacgcggaagcgtcctgcaaagagacagcagctatttattgtatgagcactattacgctgatactgcacagatttattatgagaagcgtcgcaaaaactgctatcagcgcaatccattgaagcattatgctgtctttttgagaatgctctccagacgctttaaagctaaatttgatgccaccagcatcgatgagttcgttggtgaattcaaaaggactatgccaggctacccttgtcccagcacaccaactgtctatcgctatattgatcagggcttgctggacataagcaatattgatctgcctatgaagctcaaaagacgcaggaacaagcgtcatcacagccatggcggtcacgctttgcacaagaagcatcttggcaattccattgaacagcgtcctaaagagattgaagacagaaaagctccgctgcactgggaaggagatctggttaaaggcgtcagacgcaagaatcagcctgctttaatgactttgactgaaagaaccacacgctttgaagtagttatcaagattcctgactatcgggcaagcacatgccaaaggctgcttcaaaaggagattgacagacatcctgcctggtttaaatcaatcacgtttgacaatggctctgagtttgcggatatgaccaagatcaagggctgccagatttactttgctcacccatattctccatgggaaaggggcaccaatgaaaactgcaatggtcttttgcgtcaattcttccctaagggcaagagcatgaaagacaagtcaaaagcttatgttcaacaggcaactgatgccattaaccacaaatatcgccgaatcctccaatatcacacagcagaagaactcttcaagcaatatatttcctcatagcctaactgttgcacttaatttgacaattcagggatttattttttagttattgaatatttaaataatgtttcgatagtctatttacatgctaaacggtcattatgatgctttgatttaaccaattcttatgctaatcatgatcaaaaaattattcatcatcaatgatcaagaccagatcgtgcaaaaaattaattctaaggtcagaaaaggcattcatcatctcaacgttatccttctactaattctctaactatattgtagttacttgcatcatctgaatcagaaatatctgcactagcttttctctcatttttatttactctttattttttgcgcttccaatcttatcttttaaatccaaagctttttcataaataaagaaaccaattacacatgtcaatatatcactaattgcttgagaccaaacaataccgtgatagcccagcgtcatcttcatcaattctagaaccacaaaataaatcacaccttgtctagcgattgccataataaaggcaccccaagcattaccaacagattggaaaacagttgtataaaccaatgcgattcctactacaggcgtagtaacaatcgtagctaacaacatgtaactaccggcactaacaatatccggctgattcatgaataatgctgtgacaggacgggcaaaaacaattaataatccaccaacaattaccgcatatacaacttgaactaaaatatcaaagcgaagaatatctctaagccgccgccaattctgagcaccatagttgtagcctaataaaggttgtgcaccaaaggcaaaaccaacaatcaccaaaatcacaattccatatattttttgtgtaatccccattgcagcgaccttatcagcaccataaattgccagtgacgaattcaataaagccatgccaaagctttgagcaaaattagtaattgatccaggaataccgattgctactacttccttgattgattccgcattaattttaattaacttgggatctagagtaatgaatcttgctttttgcagaatcataattactaaaatcaagtcagttacaacataacctaaaatattggcaattcctactcctgtagcaccccattttaaaacaaataaaaaaattggatctaaaatgatagctaaaatagttcctgtcattgtggcaatcatcgcctcaatcgctaatccctctgttcgaattaagttctgtggaataaagctcagaataataaagactgctccaatggaaagcacacgataaaaatcagctgcatcgttataagttgccgccttggctcctaatatagttaaaataggatgttcaaagattagcaagattactgttaaaaacagaccagtaatcattccaccatacaagcaaaaactgctgattcttttgctgagctcgtattttttctcaccaaataagcgggaaataactgacgaaccacctaagccaaaaatgtcggcaacagctattaaaaaagtaaaaagtggcgcaccgatcgtaattcctgcaactagattagtatcgcctgttttggcaacaaacattgtatctgccagattataaatcatggtagtgatcatacccaagactacaggtagtgctaatttaaaataaacttgcttaattggtgcctttgcaaataaatcttccatttgtttccctcacaagaaaaagcaacctagaagattcttcgggagtcatcctcacgattctaagtcgcttatgttacttgatattcatgtattatatgttaatctaaacaaattctttgattagatgcaatggcgtttttaattcggtaagtgtcattgttttttgtttatagcatcagagaaatctccatctatgctaaactattaccaaaatattgaaggaaaactattatgcaaattaaagaaattatcaaacttaatcaatcaactgagcaagaacttttaaccatctgggaaagcagcgtccgcgccacatataaatttttaaacaatgatgaaatcttacaaatacgcaattatgtaccacaagcgtttaaacaagtggagcatttattaatcattatcgatcatgaacaaattaaaggcttcatgggaattaatggtcaaaaagttgagatactcttcattaatgccaaagcacgcggcaaaggatacggcaggaaattgttgaattatggtatgcaaaagttaaacattgatgaattagctgtcaatgaacaaaatccaaaagcagttggattctatgaacacatgggatttaaagtagtggaacgttcagcaactgatggtcaaagcaatccttatccaattttgaggatgaagttggataaagaaaagtagtaaacagttatatttagttattcctttttcccttgacaaaaatatttttaattttcgagtaatatcatttgtctaacaacccattcttctatattatagaagacgctgctgatacggatgtataacggactgataatcctttccgtaaattgcctgtaagtcagataaggcgaacagcaaggatacctgctgttttctgaatcttggagatattcttatcagagataggtccaaaagactttctgccaggcgatggtagtcaatgtatttcagcgtaaggctttttctgagctggcaagcacaataagttgatgtgaaaatcagcttgcatcagggtttttgacctaatattaaggcggaaaacttaattggaacctcaatgtaatgaccaacaagcttgtttgctgtgacgtatgcgatcaaaagcatgctataacaggtcagaaaagaacgagtagcttaatcggcaagattaaatgatactattaggtacaatatatagaacgcacatcaagtgaaagtttacggtaagcaatccgtttaggacttcggtaggttctttgaacccaacgcaagaaagaagcataaatagctaatctgtgggcggtcttgttatcctatggctgaataaagaaaagaaaagtatgaaaagcatattttcctaacgttggatgcaaaaatgattagttgctaataacaaccagtagcattaattaaaaggagaccggtttgtctatgaagacagctggtctctttttaatattctaattattttactgtattatcacctgacactgtgtgcatccctaagtgactgccatttgtctccttacctacctatgcatgagttgccttaccaccaaagattgaattatcaccgactacagtcttcaaatcacattgatccacttcaatattttcagccaaattatcacctgaagtcgttgccacatcaagatcatcaagaatttggctatctttaatggtaaagtcaccgctaactagcttaatcttaccacgatttagcaataccttctttaatttaatatcacctgaagtttcagttattgcaacttcatctacttttactttcttcaaatgaagatcaccactaagagcagtaaatgttactgtctctaactcaacttgttttacaacagtgtcaccactagtcaacttcaaagtagcgttaactaatttatgttctaccggcactgtaacttttaatgcaacaatatcatcttgactcacaatactgatttcaacatgctttcttttccagaatttaccattcttgcgttcaaccttaggttcttttaattcaagagttttacccgcattagtcacaatcggcctcttatcttctggaccgtggtaatgtacctcgaactgatcgccgccaaccaatgtaaaatcaatatctactaaatccacgctcaatttgtcaaagctatcattgcttaaaactttatcaacaattttcacttcattgtcttcatttttgtcaaaaaacattttctttctcctcatttttaccttttagctattattcttatttttctttaagtttactatcatattgctatttttcaaccgtaatttactaagtggtcaaaatttgcggctgaaatgcaaaaatagacaacttaagttttaacttaagtcgtctatccttcatcctaaaattttctttttcaattcgtctaaacgatcaattttaaacgtgaacgcctgtatccctaattcacttgcagctttggtattattttccaaatcatcaacaaataaacattcttctggctttaaatcatatcgttttaacaaacattgataaatctgcttatcaggcttcatcattttttcctgtgcagaaaagacaaaaccatcaaaataatcacccatcgaagaatttttaacaaagttagcaaattccatccctgtattagacaaggcgtagatatgatagccttgctttcttagttgatccataaaacgaaaaacaggttcatagaaatctacattttcaggccaagttgtcataatttgcttaaccttcttctgcagctcaacaggtacgcgactaataaaaatcttagtcgcctctttttcatcgatttttcctgcatcaatttcagaccattcttttgattcaaaaatcgtttttctcaataaatcatgttcttctgatgttaattgataatgatataaaatttcatcaggattgtaattcataatgacgttgccaaaatcaaaaataatattttttaacataaaatgtcccttctaatacttttaattcacatcttaattttatgctttcttgtatcactgcgaaagaaaaataaaaattgactttttctttttatcaaataaacacaggataagtgaagtcattaaatcttttagccaagagcattgtaatagacacataatacagtataatgattattatcaattacataaaaaggatgatgattttgaataaaaaagcattcagcctagacggcaatcaattaaaaactttagcagttgtgtttatgatctttgatcatatctacagctatcttctattggatattctaccaaattggtgcagtttaattgctcgcttcgttgctccacttttcgttttcatgttaattgttccccatgaccctggcattgcatatactgcataaaagtcattgccagtaaacttttcaagatgcgttttgtctttgccaaattcatccttacctgtctcagtagcattttgatattttacaaaagtatcttttagactatttgcatcaatcttcaatttattagctagttcaacaattgaattggcatgtacatatacttggggattttcttctactttatctagtttttccttaaatgatgaatccatttttttgccatcataaatcaaataatacttttcacttccatgcttgtacatttccgttcttaaattcaagaaattatatggtgcctcattagaaaaacgtttgccattctcatcaattaacattgtttttgaataatcaggtacagtattccaagtgataaataattgtggggcaaaatcaatcgttccattcttataaacatcattatttgaaaactctgcattaacagctttcagtaaactataaccatcaccagtattggcaggactagcttcgttaaagacatgaaccttagcaacagatggtgtgaccttattaagaagatcatccttttcataagaagcaccgcctgtggcaattactacagctttagcactaatagtaaattcacctgctgaatttctcacttgcaaccctgatactttggttccatcatctattatttttgtaacccgactgttcaaataaaacccgccgccatgttctttaatgtaattagccagcatttctactaaatgtgcgccattagtgaaattagcaataataattggactatcagaaaaaatacttacttgcgaatttgttaaggctactaaatcatcgaatgtttttccagactcttctaacaattgttttaagaattttcgatcgtgctccttagttgcatttttattaacatgatcgacaaagttcaataaccttatcattgtcggtagctataattacagtcgcattattaatttgctgctttaatccttcttcactcgggtaaacaccccaatgctagtcgggactataatcatccgttttttgatcaagacaaacttgtttgtaaaaagcacaaacttggcttaaatcttgaacagtagcagttcttatttgcaaaaaaatcccccttctattctatagttttcgattataacaaaaatgcatccccttcccaagtaggatgtggacgcattcatttaatctatattttattcatcaatcttaggggccttgccgatttgagcttgcatcatccagattctcttttcaatatctgtatggcatgacgttaagatatcatttgagccatagtcgccttcctcgtcacttaccttgatcccttcttcataaaggtgctccaaataacgataatcagcaatgatagtcgcaaatctttctctagttgaaattccccattcaccaggatgagcttcgatcttagtatgatcaagcacttcctgtaagcttgaatatggtgacccatcaattgtaatcaatctttcagagatcaagtcacgttgttcatcaagttcatccattacctcgtctaaatatgggtgcaattttaaaaattcaggtccacgcatataccaatgttgttggcggacaaccatcattaattgagtagtatcagcaacagcttgatttaatatttctttggttttaggatacttcataaattagccctctttcaattagtaacttactttatataactattatatattttgttatcgcttttatcaaattatatgttttatgtaataaaaaatgtgcccgaacaagcacatttttaagtaagtttaaaagaaaattttactcataataatcatgaataccaacaaacaagttgagctaactgcggcagccccaaagactgaaccgccacgcttaaagattaccttgaagttaacggaaattcccaatgcagccattgccatccctaaaaagacatatgctgcttgcactaagaagtctaaagtccgcgcagacattggtaaaaatgtaccaataatactagttaagataaatccacccaagaaccaaggaattggtaatttcttcggtgctctagtatgttctgcttcactttccgtaaccaaacgcttttggtaccaatagcccacaattaaagcaaccggtgctaaaagtaatacacgagataacttcataattagagcgctatccaaactgacttcaccaaaagcacttcccgctgcaaccgcatgagcaatttcgtgtaaagatccacccgctactaccccatattgtgtatcagttaagccaagaagcggtttgagcacgatttcaagtaatgtaaacaccgttcccatgacacaaacaacagccaccgctagaacttcgttttctctttttctgtcttcatcgcttgtctcaatttgtggtgacacgcccataacggcagctgcaccacaaactccacaaccacaagccgacaaaatagctaactcatcttcagcaccaaacttacggctaagccaataagtaagcacaattgttccactaactgccagcgccgcaaccagtatagtcttaactcctgcatcagccaacttagtcaaattgagtctaaatcctaacaagataatccctaatcttaaaaacttgttggaaataaaacccatgccagctttcgcttcagcttgtacgctctgaggcgttatttgcagtgcaatccctaataacaatgcaattaccaatgccccgattaagtttacgtatggcaatttagccaagaaaattcctgctacagaacaaaataaggtcatcgccgtagctaaccagaatgatttagttttaattatgtttgtcaacaaaaatccctccatatgtgatctgtttaatttgacaaacacaactccctttatgatgattgtaataagtatactattattttctattcttgacaaggcaaattattaataaattcacattaactaaaaataaaatattttggcattatttagttaagtaggttataatacttttgttacggagtgttggcagagtggtaatgcaccggactcgaaatccggcgaaccaagttttccttggcgcgcaggttcaaatcctgtacactccttttgtcaatatgtggaaaagaccaagtgcaatgcttggtcttttttatcttagtcatttttaatatttaaatgctacacttgctaatagcacattatttaaagatatagaaaagagattatatattatgtgtacttcaattattttcagtccacaagatcactattttggacgtaacctcgatcttgagattactttcggccaacaagttgtagttaccccacgcaattatgctttcaacttccgcaagatgcctgaaatgaagcatcattatgctatggttggtattgcacttgatgctggtaattatccgctctactttgacgcagctaatgaaaaaggtttaggcatggcaggacttaactaccctgacaatgctacctactatgatgaagttgccaataaagacaacattgcttcatttgaatttattccctggattctgggtcaatgcgcaactgtagcggatgctaaggtattacttaaaaagatcaacattgttaaccttaatttctctgacaagatgcaggcatccccacttcattggttaattgccgataagacaggtgtttcaattgtcgttgaaaccgataaagatggaatgcacgtttatgataatcctgtcggttgcctgactaacaatcctcagttttcatgtcaattatttaatttaaataattatgctgatgtttcacctgcaatgcctaagaacaacttttcaaaagaggtcaatatgaatggctacagccgtgggcttggttcacgcaatttgccaggtgggatggattcagaatcgcgctttgttcgtgtagcttttaacaagttcaacgctcctgttggtaaaagtgaggaagaaaacgtagacaattacttccatattttgcattctgttgaacaacaaaagggacttgatcaagttggccctaattcatttgaatacactatttactctgatggtaccaaccttgacaaggggattttctattacactacttatactagtcagcaaattaatgtcgttgacataaacaaagaagacctcgatgctaaggaattaatcaagtatgatatgttaactaagccaacatttaatcaccaaaactaaataattgaaaaataatgttaattttattcccggatttaaaattgaagtgcaacactaagtgttaaacaaaaaggccatgaagacctaaacttgaagtgacgaaaaatcaagaaaggaagatcttcatgaccaattcaaattctagcatttctaagcactatcatcaattaaccagcgtacaacgtggacaaattcaagcaatgctggattccggcataacttcccgtactgttatcgctcaagaagttggctgccataagtcgacaatcagtcgcgaaatcaaacgcggaagcgtcctgcaaagagacagcagctatttattgtatgagcactattacgctgatactgcacagatttattatgagaagcgtcgcaaaaactgctatcagcgcaatccattgaagcattatgctgtctttttgagaatgctctccagacgctttaaagctaaatttgatgccaccagcatcgatgagttcgttggtgaattcaaaaggactatgccaggctacccttgtcccagcacaccaaccgtctatcgctatattgatcagggcttgctggacataagcaatattgatctgcctatgaagctcaaaagacgcaggaacaagcgtcatcacagccatggcggtcacgctttgcacaagaagcatcttggcaattccattgaacagcgtcctaaggaggttgaagacagaaaagctccgctgcactgggaaggagatctggttaaaggcgtcagacgcaagaatcagcctgctttaatgactttgactgaaagaaccacacgctttgaagtagttatcaagattcctgactatcgggcaagcacatgccaaaggctgcttcaaaaggagattgacagacatcctgcctggtttaaatcaatcacgtttgacaatggctctgagtttgcggatatgaccaagatcaagggctgccagatttactttgctcacccatattctccatgggaaaggggcaccaatgagaactgcaatggtcttttgcgtcaattcttccctaagagcaagagcatgaaagacaagtcaaaagcttatgttcaacaggcaactgatgccattaaccacaaatatcgccgaatcctccaatatcacacagcagaggaactcttcaagcaatatatctcttcataacctaactgttgcacttaatttgacaattcaggtgttaattttatttaaagattagcattatttttgtttttccggttaaaatagattgtacttatatagtaattggggattttcttattaatgaataattattttgtactgctactgtctgcggcagttttgctctggcttatttttaatatcaaaaattcacgtcgtttcaatctatttgatcactggcttcaccaccaattggtcaaacgtcatgattgctacagctggcaggttatcgcttttattaatgatcctaaactaatggtcgtttgggatgtattattagcaggcctacttttaaacgaagaacgaaatctaaccgctctttgggtattaggaactctaggatttgctgacatttctggtattattctaaaaaaacttattcggcgcaagcgaccattattacattccgataaagaagatggctatagctttcccagcggtcatgttttaggtgccacaaccatgggcttaatcgtactacaactatttgccaaagatcttggaaccggatttgttattgccgtagtagctatttgggcaatggtaattttctctcgtttaagtttaaaggcccactatccttctgatgttcttggtgctactagtttagcaatcgtttgtttcagtatttcgcagcaactatttttagcgatttaaaaaggatcacgttcagcacttgagcgtgatccttattttttattcatgaaagcctaccataatgccgccttcttcagcatagaaactacataaagcatgcattggacgaatagtaatttgagcttcagggtattcctccaatattttatttttaattatttctgcatctttttcattttcgcaatgatcgattatcacttcgccaccgtgataattatcttccttcatatacttaataatttcacggatggcctttttcattccacgagccttagtaagtggctcaagttttccttctttacttgctgttccgatcaagttgattttgagcaaacctgcgattttggctacagctggtgaaacacgaccgtttaaagataaattatgtagtgattgcaaaacaaaaagcaaatgagtctgcattctaaacttagcaattgcttcttctagatctacaaagcgcatttcaccttgcagcattttctcaataccatggactatgattgctagctcaggtcccgcacttcttgaatcaactactataattttgctcaagggatgtttttcctcatacattgcttttgcctgaagggctgaagaaaaagtgccactcatcccgctggtcattgtgacgataatcgctttttctgttccttcaagtgcgtcaagccatgcttgaatacttggacaagttgttttgcctgccacattattttggttcatattggacaaaaattccttcatattcaaatcttgattatcaaggtagtcctcaccaccaaaagaaattgtcagaggcactacttccaaattacgcgccggatcattattcatattggcacttgagtcaacaattaatttaatattttccattttagattccttattttttgtatttattttaatacatatattatagtcctttgatatagagttttttaggctgctttactaatttttaaaatgtaaaccgctttcatatgtttacaccgtcacaaagttaggctaaaatttgagatgtaaagcggagcaaaaattgttccgtatggtatgaaaaacataccataatttttgaggaggtttattaatgctcaaatcagttattgaaaatgtacacgcacttgaaattttcgactcacgtggtaacccaactgttgaagttcacgttactctttcaaacggtgtcgtaggtaaggctgaagttccatcaggtgcttcaactggtgaaaacgaagctgttgaattacgtgacggtggttcacgtcttggtggtaagggtgtttcaaaggctgttaacaacgttaacactgaaattaacgatgctcttaagggtatggacccatacaaccaaccaaagattgacaagaccatgattgacttagacggtactccaaacaagggtcgtcttggtgccaacgctatcttaggtgtatctatggctgttgcagttgcagctgctaacgatgctcaccttccattgtacagataccttggcggtactgatcttgaaatgccacaaactttccacaacgttatcaacggtggtgaacacgctgacaacggtatcgacattcaagaattcatgatcactccagttgctaagacttcattccgtgacggtttcgaaaagatcgttaacgtataccacaccttgaagaaggttcttgaagacatgggttacgaaactggtttaggtgacgaaggtggtttcgctcctaacatgaagaactcagaagaagctttgaaggctcttcacgaatcaatcatcaaggctggttacaagccaggtgaagatatcgctattgcatgtgactgtgctgcttcatacttctacaacaaggatgatcacaagtaccaccttgaaggtaaggttcttactgatgaagaattagcagattactacgacaagcttttggacgaattcccagaattaatttctatggaagacccatacgacgaaaacgatgttgacggtatggttaagttcactaagagccacaaggaccgtatccaaatcgttcttgacgacttcatttgtactaaccctgcacttttgactaaggctatcaaggaaggtgctggtaacgcttcacttatcaagttgaaccaaatcggtactgttactgaaacccttgaaactatccgtctttcacgtaagaacggttacaacactatgatttctcaccgttcaggtgaaactggtgacaccttcatcgctgacttagctgttgctgttaacggtggtcaacttaagaccggtgctccagctcgttcagaacgtgttgaaaagtacaaccgcttacttgaaatcgaagaagaacttggcgaaggcgaacgtcttgcattcttcccagacgatgttgaccacgattaatttcgagttaaccgagtacaatttcaaaaaaagcatgagaattaattttctcatgcttttttgttgcgcttttacatatttattttatcaatttgctaaaagccttatttaaagtgcgatccttaactacttttaccataattggattttcgtttttagattgatcaagcaagataattggatttttatccttcaaacagaacaagtaagtattatgccacgatttaaaatcatcattagcaatggcaagcacattatagtcatattttgttttgccaattggactgtagccgatctcaattgtttttttatttagaataaatcgattagtagtcaatactttggggtaagttgcaccctttttagtctttaaactcttttttccatcatagaattgataagtttgccctgacttttcaccccagttattaactttcctttttagtttaacagttttagcggcatcccagattctagttgctttttctttatctttcctcttatctggcttagccttctgtttaggcttaacttgttttttgtctgaaaattgcttttttactggttttgttttctttttagcaactgttgttttcttagctttttttacttcaccaatagttactgcatctttaccgaaataaacttgactacaaccagttaaagtcgttgctaaggtaattgcagcgagtcctattaaaatttttctattcataattgctccatttattatttcttataatattattgcataaaatagtctcattaaactttaggcaaaaaaatagagctaattttccaattagctcgcggttttttaataaatggtgacttgataacgattggaacgatctgtttcttctggtttttcagcaatcttcccaactggcactataacactcgtttgaaaggcaggatcaatgcctaattctttttgcaattcaccggcatcatttaacctaactgcaccgcccatgacataaactgaacctaatcctaagtctgttgctgccagcataatattttctgctgcacaagatgcgtctcgttcaccaaacatgctatcttttttggtattaattacaaacaataccggtgcattgtagcaagcattatcagttttttctttgatcttattgcgtaatccttcatccttaaccacaactagattcatcacatctgtttgattcatcccacaaggtgcagtttgaaaagcgacaatcaagttcttaagatcatcatctgaaatactttctttactaaaatctctaactgctcttcgattagtaaaaattgaatttaccatatatgcctccgcatttactttacatacgcgtggtgctagttaaatcgttttagttaataaaaaagtccaattagactagactcaagttgtaagtaatttaaatagaaaagagtctgatctaattgaactatctcaagcttaatcgtttttctcaccatttacaagttagttttaatcggttaaatgtgatttgtcgctcgctgtataagctttatgcgcctgatggacttaaacatcgtaaaaatgttgatcagaccaagcttcctgatagttctatcttagcgatgctcatttggcaaactgaaattggaattgaatctcaacgaagattctgtaaattcttcgttggcttatctcattctcgttttaaccgtcgagctcgaatgctcttgcctctaattcgttgtatccgtcagggttggaatcaggaagtaaaggtaggtggagaattattgattatcgacagttttccgattccagtttgtcagcctgttcgcaattatcacgttaagatcttccgtggcatagccgatattggttataaagcgacgaaaaaaatctactattatggcttcaaagtccacgcaatagtgagtgatgatggctatctgcttgactacgcagttactaaggcgtcggtacatgatgcaaaagagacggtagaattgatgatcaatgctcatccaattaaccattatcttttaggagatgaaggctatttaggaaaagacttagcagccaagctaaagcgtatgggatacgtgctttggacaccatatcgtaaaaacatgaggggtgctaaaaagcataatgatcatcagttaatggcaattagaagaacaatcgaaagcgacttttctttgcttagctattacaatgctgagaataatcgagccaggagcttagtaggttttcaacaacggctagaaatagctattttagcttataatatggcatattgtctagaacgatttaactagcaccacgcgtactttacatgcttattttagcatgcaatcttttattgacaacgttttcataaatatttatgatgttcttaaaaagtatagatttttatgaggtgaataaataatggatttagcagcaattgatattggcggtacaacaatcaaaatcgcaacttggaaagacggtaaattacaggataaacatgctgttaatacgccaaaggatttaaatagtttttacgatattttgactgcagaagttaataaaattaaacaaaataccaaaataaaaggtgtcgcaatttctgcaccaggcgctgtaaatcaaaagacaggtattattggtggcactagcgcccttccatacatccataactttaaaatcgttgacgaattaaaaaagcgttttgagttacctgtttctatagaaaatgatgccaactccgctgcgttaggcgaattagcagaaggtgctggcaaaggcagtgacagcatggctttctttgttattggtacaggtattggtggtgccatcattattaatcaaaaagtctggcatggtgctcacctatttggtggtgaattcggctatatgggcattggtacaaaatctgttagtgatctggcatccccagtggcaatggctaaccgctataacgaaagaactggtaaaaaacttgatggtaaaacagtcttcgctttagcagacgaagatgatccagtagccagcgatgagcgtcaaaccttaattcattccctagccttagcaatttacaacgttcagcaaagttttgaccctgacaaaattgtaattggcggtggcatttctaataatccagaattaattccgttattgaatcgcgaaattgactatattcgcaaacaagtcaatccagcaagtattaaacctgaaattgtgctttgcagtttgaagagtaatgcaaacttacgtggcgcagttgcagattttgaacaagcacattaaatttttataattatttaattccattaaaagcccgctatgatgggctttttgttttgtatttataaaaagtatacgcgtggtgctagttaaatcgttctaggcaatatgccatattataagctaaaatggctatttctagccgctgctgaaagccagctaagctccttgctcgattattttcagcgttatagtaactgagcaaagaaaagtcgctttcaattgttcttctaattgccatcagttgatgattattatgttttttagcacctttcatgttttttcgatatggtgtccaaaggacatagcccataccttttaactcggcagctaagtcttttcctaagtagccttcatcgcctaaaagataatggttaattggatgagcattaatcatcaattctgtcgtttctttggcatcatgcactgatgctttagtgactgcgtagtcaagcaaatagccatcatcgcttactagcgcgtgcaccttgaaaccataataatagactttcttggttgctttatagccaatatcggctatgtcacggaagatcttaacacgataattacgaacaggctgacaaactggaacaggaaaactgtcaataattaaaaattctccagcaacctttacctcttgattccaagcttgacggatgcagcgaattaaaggcaaaagcatcttggctcgacgattaaagcgagaatgagataagccaacaaaaaatttacagaatcttctttgggattcaattccaatttcagtttgccaaatgagcatcgctaagatggagctgtcggaaagctttgtttgatcaatgttttttcgatgcgtaagcttatcaggcgcataaagattatatagtgaacgacaaattacatttaaacgactaaaactaacttgtaaatggtgagagaaacgattaagcttgaggtagttcaattagatcagactcttttctatttaatttacttacaacttgagtctaatccgattggacttttttattaactaaaacgatttaactgaaactgtcaaatcttttgtgtaaatagttctttctcgtaaattgattttttaattatttatttaatcaaagtaggattctaaggtgtcctgaacctgaccaaagcctttatgaattcgattgaaataacggtcattgtagctcattgcctgaatgccaataaaagcatcaagcgactgttcagttggaaactctgccttaggcttagctttgcgcttgatcacattgttaaatgattcaatcatgttagtcgaataaattgaagctctgatctgcttgggatagttataaaagaccagcagatctggttctatgtctttcaagcttctgataacatggctgtaaaccttgccccatttggtatagaagtcatgcaggacagctgtggcttcttctttgtttgtctgttgatgcacctgtttgaattcgttcatgatcttttcacgatcgtcgacgcgtactttagcgcagatattgcgcatgacatgaaccaagcagcgttgaaaatgagctttaggataagtcctggccaaggctgttttcatgccaacaacaccatcagaaagaaaaagctcaacttgctttaagcctcgggatttcatgttttgaagcatatctgtccagacttcaatgttctcgctaggtgcaatgcagtagtcaatgacctccttgtgcccattaggcttgatgccaatggcaatatagactgcttcacgctcaaatgtttctcggcgcaaaggaaggtatgtcgcatccaaatagacgcagaaaaacttgtcgcttagcttgcgtttgtggtaagcctcaacctttggaatcatctgcttggaaatatttgatacctgagctggactgtaatggctgccatacatcttttcaattagatcggctatttccctggtggtcacgcccttggagtaaagcttgataatcatgctttccaagatatccgagtgctgcttgtagtcaggcagcgtgtgctgatgaaattgaccgttgcgatcccggggcacttgcacttcaattgggccaaattgcgtatcaactttgcggaaataagcaccatttctagagttgccagtattccagccatttctggcatagggatcatagcccagaaaggcagtcaattcagcttctaacaagttattaacagcctgttgtagctctttgcgcaataaatcatttattttgtctggattgaatagagcttgagcaaaatctttggtaaaatcattcatgaaggagttcttctttctgtatgtgtttttttgttcaaaccaatcatacgagaaaggaactcctttttctaatgtttaaagaaataaatttaaggaatcattcatccttacacaaactattttacagtctcatttaactagcaccacgcgtaaaaagtatatatttttatataaaaagctgtttatttttgcatgcattatgctatacttatttgtgtaaaaaaaatgaaagcacttacagagaagagaggatctagatgactgaaaagcgcaaattgccatccacattcctttggggcaactcagtttccagtatgcaaactgaaggtgcatggaatgaagatggcaaaggtctttcagtctatgatgtccgacctgctactgacaatactagtgactggcatgtagcaattgatgaatatcatagatatgacgaagacctcgacttactgaaggacatgaacatgaacatgtatcgtattcaaatttcatggtctcgtgtttgtcctgatggagacggcgacttcaatcaaaaaggtattgacttctatgatcgattagttaatgcaatgcttaaacgtggcattcaaccaatgatctgtctttaccactttgatatgccgcttaatttagccaaaaagtacaacggttttatgtcacggcacgtagttgacgcctttgtccgttttggtaaaaaaatgatcgatcatttcagtgatcgagttaaatattggattgtcttcaacgagcataatctatatttccaagatgaagtttttaatatttcaggttacgaatctggagataaaagtttggatgatatgtacactatcttccaccatacggtgatgtgtcatattcaattagcaaattacatccacgaaaatcactcagacgtaaaaattggtggaatgcttgcttaccaacaaatttatccagcaacgagtaaacctgaagacgtttgggcagcaaagcaagtacaagagtttttaaactttaatatttacgatgctgacaccggctgcggctattcaccagaagtaatgcaatatgtcaaaaatcatggcattcaaatggacattacagatgaagataaagaaattatgaagaaagctaaagctgatttcctagcattttcttactattcatcctgggttttatctagcgataaaattcctgatggtgaagctcctaaccattaccttaacaagggcggagttgagtccaaatatgttaagacaaacgattggggctgggcaattgatccactaggatttaggaatgcaactactaccgtattcctattttccctattgaaaatggtatcggcctcaaggaaacttgggacggtgagcatatgattgaagatgatgagcgtattgcttatcaccgcgaccatatcaaagcaatgaaagatgctatttttgatgacggcgccaaggtgcttggttatcttggctggggattaattgatattccaagttctcatgctgatatggaaaaacgctacggtgctgtttacgtcaacagatcaaaccacgatttaaaagatttaaaacgtgtgcctaagaaatcattctattggtttcaaaaggtacttaaagataatggagatgaattataatgactgatcaaaaacaatctgggttcagtaattttgtgaacagcaaaattctgccacccattatgaaatttgttaatactaaagctattgttgctttacagaatggtatgatctatactttgccattcattattgttggttctattttcttaattttatccaacatccctattccagcagtggctaatgcaattaatgcttctggttgggggggcaattttcaatcaagcctacaccacaacttttaacgttatggcactttggggctcaattggtattgcttatatttatgttaaaaatgaaggctatgaaccattagctggtgggcttactgcatgtgcttccttcttaatgctgcaaactttagcaatcgacagcccattaaaagccgctttaacttccggtatcaataacggtcaaatgagcggcaaggtggttgctgaaaatattgataagttacctcatgctttacaaacatttttggaagctcctgtaactggtgttatcaacatcaattggcttggtggtgacggtatgatcgctgccattatcgtaggtttgattgttggttgggcttactcagcaatgatgaaagctggttggactattaagcttcctaagcaagttccacctgcagtatctaaccaatttactgctatgattccagctggtgtaatcttaattgttactatgcttatcttcggtgcatttaataactttgcacacactgacttcttacaatgggtatacaaaaccattcaatcaccattacaaggtgtatcagattcatttggtggtgcagttgttatcgctttcttagtaccattcttctggttcttcggtgttcacggtggtttgattgttggttccattgctggttcacttcttcaagcaaactcatttgacaacgctcaattatacagagccggcaaattaactattgccaacggtgctcacgttgttactaacgaattctacaacaactttattaacttaactggttctggtattactatcggtttagttatcttcatcttaattgctgctaaatcagcacaaatgaaatcattaggtaaattggaattagtacctggtatcttcaacattaacgaaccattcctcttcggtatgcctatcgttatgaacccattccttgcaattccattcttcttaacttcaattgttgtagctatctctacttactgcgtaatcagatttggtattgttccaccattaaatggtatggctgcaccttggactacgccagccgttatttccggattcctaatcggaggttggaagatggccatttggcaagcatgtactctagtaatttctactttgatctattggccatttgctaagaagtatgacaatatcttacttaaacgtgaacaagcaaacgaaactaaataataaaagaggtatttaaaattcgctgattgtaaaattaaattgaacacttaataaaaaataaaaagtccattcggacctgtttgtactgagacgtaaaaagtagacaattaaaatattggattaatagaggcttgacttcgatactctttcggggttaagccttttaatctgctctttatcctttcgttgttatagtattcgatatattcctcgattgcttgagttaattcttgaagattatgatacttgtattcttgatcatagaacatttcagttttgagcaggccaaagaagttctccattagcccatcatccatggagttgccctttctggacatgctttgagtaataccatggagttttaaagctcgctgataacgagggctttgatactgacagccctgatcagtatgaaaaatgcagttattaagagctgtttctttggcaaaagccttgtcaagcattgtcattactaaatccatatctggatgtttggagatagtataagaaactatatcgccaccgcagccgtctagaataggcaataagtaaagcttttcattattaagatgaaattcagtgatatcagtataccattttgtgttaggcagggctgcgaagaaatcacgatgaattaaatttggagctattttgccaatagtacctttatagcttgaatatttgcgcttattgcgcctgatgcctttaagacctaatttatgcatccaatagcgaacggttttctccgtaactttccagccctctttgattaactgcaaagctactctgcgatatccatagcggccttgatgatgattaaaaatctcatggattctagcaataagctttgaccgtttaggcttgacgggctgtcgtttgataatcttgtagtatgatcttctggcaattataggtagctcagggtgctctgcaatcgcagctaatacataatttaaactaactttgaattcttgccttagatccgtaatcaccctagctatttcttctgatcttcttgatccaaggcacttagtttttttacgtattcgttcacaatacgcaatcgcaagttttcttctttcagctgctggatctctttctccagttccttgcgagatttctgcttttctttggtcacgggcagggcgtcctttctgtttgataatgacattatacccgtttttcttatattctctaatccaattgttaagcatgccaatacttttaaaccccagttccaaagacagctgtaagtatggtttattgccaaagattgcttgttcaatagttcgctgcttaaactctttggaatagctttggtttttagtagttaaaatttctattccatgcatatcaattaatctaagcatatagtctaaattagctagattcattctgtacgctttagccaattgactgattgagatattttcatctttccatttatgataaatttctattttttgttctttattaaatttagacatagtaaacattctaagctaaatagtgaattagttatccgacgggataattgattcactatttttattcttttgtagaattaaagtagtggtaaaacgatatgccctgaggtctttagacacttgatgtcgcataataaactggcagttttacttaagttttcaatagtctcttcgaagaatgtggacactagatgtcgagtttagaaaattagatctgatttcttaagtaaatacgttttactactaagttttggaggtttttattatgcaagttacttttggaattgatgtaagcaagtctacttctactgtttgtgaactaattggtgaaagcaaaaatgaactaaccattactaataatcgtcctggttttattcaattgcttcatgaattaaccgctttttctaaacatccgcaaattatttttgaagctaccggtgtttattcacgcagactgcaggcttttcttgaagactacggctatgaatatgttgttattaatccgcttaaagccaaaaaagagatgaatatggggctacgctacaacaagaccgataaaactgatgcttatcatttagctttaattcaaagactttatcgccatccggttaatcaaagcgaatcccaaacttataagcagcttaatgctttgagccgcttctatgaccagctgacaagtgacttggtaatagctaaaaatcgacttcaccaagctctacaatcgacttttcctgaaattgaaaatttattttcttctgctaaaggtaaaaattactggcaaatagttgtgcgatatcctcattgtgacttagtaagaagagaagataaaaaacagcttattaactggttaatgagcttaaaggggattgcttttaaacacgctctaaggactgcagataaattaattgaattagcttatcaagcttatccagttgtatcttgctctagcatagaagtcgagcaagtgcagtattatgcacacagattgcttaatttaagtgatcaaagagaaaatttaatcgcaagaatggttaagttagcgaagtctttgcctaatcatgatttagaaaacctagaaagcattccaggctttgcacagaccactgctgtcagagttttagcagagttaggagatttacgcagatttagtaatcctaataaaatcaatgcttttatcggaattgatccaggcagatatcagtcaggagaaatggactctaatttaagtattactaaacatggcaatgcagtcgcacgtaagttgctttatcgagctattggacaaattgataatgcagctaagacaaatccgtgtcatatagcagattattatgaaagcaaaaagctatcctctcaaaccaaagggttcaaaaagatagctattgcttcaattcataaactaatcagaaccatttatgccctgattatcaatgatcaaccatatgattacaacgtagccacacataatcaaaaagactttagtcgtaattaattgatcaagtacattataacgctaagcccaaaaatcagatatggatctgggcttatttgtcgtgtctaactaaaaaaataaatcgacactaaaagatgtttaagttgaaatttaaacaaaaaatgaagccaaacttcttattatgcttgactttacgtagaaaaagacctaaaagtgtctaacttttaggtctcagtttagtttgatagaatgtagttaccacacaacatttagaaacgaggtcaaaatggactctttacattctaccatgaatcatcacattaaaggcaagcatttatcattcgaggaaagagttattattcaattgcgtttgaaagatggctattctttgcgtgccattgcccgtgaattaaactgttccccttctactatcagttatgaggttaagcgcggtactgtagaactgtatcatggcaaagccaaaagatataaggctactcaagggcatgatgcatatcaagctcatcgtaaaaattgtggacgtaaatcagactttctcaggaaaactcaattcatgcgctatgtccacaaacatttctttaaagacggctggtcgcttgatgtgtgcagtaatcgcgccaccgctgttggcgcatttagcagcagagatgttgtctgtactaagactctttacaattatgtcgaccaaggtctattagatatacataattacgacttgccagagaagcttaaacgcaataccaagcttcatcgtattcgcagaaataagaaaaaacttggcagaagcattgaagaacgtcctaaagaaatcaataaacgtaatgagtttggccattgggaatgcgatttagttctcggacataagagcaaagatgatgaggtgctgctaaccttatctgaacgtatgagtcgtgagttcttaattcttcgtattcctgacaagacttctgtcagtgtcatgcaggcctttaaagaactccaaaggcaatacagcgaacattggaatgatatttttaaaaccattaccactgataatggctcagagtttgcagatctttcaagcttagaagacgtatcaaatactttagtttactatgctcatccttatacatcttgtgacaagggaaccgttgaaagacataatggactcattcgcagatttattcctaagggagaggcaatagacaattattcactacaagacatcatagacattgaaacctggtgcaactctttaccaagaaagatattggcatatcatacaccagatgaaatctttgaaagagaattagatctaatctatcaagcagcttgattaaaagtgttcaatttattattgcaatttacgggtatttaaaattgaataatgaagaaaaaattgtaaatgaatttgatcgtgacggtcaccattataaaattggcgtcaaagccgatggccaagtatctgtatacttggatgatgaaactaaagctcatcatggatatcacttccctggtgttatccaaatccctaaaggaattgaaatcgatggtcaaatggttttacgactccctattgactgtgatgatgcaattgatcaaggtattaaagatttgaaataattcataaaaagagacgttgttaagctataaaaatagtaaaataatgtctcttttttactaaagtatagactttgctatataataaaaatataaatctaatatagaaatagaatggaaaagaaactgtcaaatcttttgtgtaaatagttctttctcgtaaattgattttttaattatttatttaatcaaagtaggattctaaggtgtcctgaacctgaccaaagcctttatgaattcgattgaaataacggtcattgtagctcattgcctgaataccaataaaagcatcaagcgactgttcagttggaaactctgccttaggcttagctttgcgcttgatcacattgttaaatgattcaatcatgttagtcgaataaattgaagctctgatctgcttgggatagttataaaagaccagcagatctggttctatgtctttcaagcttctgataacatggctgtaaaccttgccccatttggtatagaagtcatgcaggacagctgtggcttcttctttgtttgtctgttgatgcacctgtttgaattcgttcatgatcttttcacgatcgtcgacgcgtactttagcgcagatattgcgcatgacatgaaccaaacagcgttgaaaatgagctttaggataagtcctggtcaaggctgttttcatgccaacaacaccatcagaaagaaaaagctcaacttgctttaagcctcgggatttcatgttttgaagcatatctgtccagacttcaatgttctcactaggagcaatgcagtagtcaatgacttccttatgtccattaggtttaatgccaatggcaatatagactgcttcacgctcaaacgtttctcggcgcaaaggaaggtatgtcgcatccaaatagacgcagaaaaacttgtcgcttagcttgcgtttgtggtaagcctcaacctttggaatcatctgcttggaaatatttgatacctgagctggactgtaatggctgccatacatcttttcaattagatcggctatttccctggtggtcacgcccttggagtaaagcttgataatcatgctttccaagatatccgagtgctgcttgtagtcaggcagcgtgtgctgatgaaattgaccgttgcgatcccgaggcacttgcacttcaattgggccaaattgcgtatcaactttgcggaaataagcaccatttctagagttgccagtattccagccatttctggcatagggatcatagcccagaaaggcagtcaattcagcttctagcaagttattaacagcctgttgtagttctttgcgcaataaatcatttattttgtctggattgaatagagcttgagcaaaatctttggtaaaatcattcatgaaggagttcttctttctgtatgtgttttttttgttcaaaccaatcatacgagaaaggaactcctttttctaatgtttaaagaaataaatttaaggaatcattcatccttacacaaactattttacagtctcatggaaaaacatggcaaaggcaaaatatctagaagtagcaaatgaattaagaaaaagaattaaacaaggcatctacaataagcaagagcctcttcccgatcaagagacatttgctcaagaatttaatgtcagtcgcttaactgtcaaaaaagcatttgatggtcttgaacgacagggtctggtttataaacaatccggacttggcaccttcgttactggagaaattccaattaaggaaaaagttgatgctccagctaatgcattcattggtttaagaaatcaactaggcaaagatgccgttaagagtcaaattgttcatttctctgtagagtttcctgatgaacaaatgcaaagaaatcttgaaatcaagaaaacagaacccgtttacaatattctgcgattgagactttataatgataagcctcttatccttgaacatacatacatgccagttaaattggttcctgatcttgatgagagcatcttgcataaatcaatttatgattacatccataagaatcttaatttaaaatttggacacgcttatcgtaagattcgtgctaataaagcagacgaatatgatcaaaaatatttaaatgccaaaaaagatgatcctattcttgaattagaacagattatttggcttactaatggtcaacctgtcgaatattctatcagcaagaatcgttacgatacccgtgattatgtattgttagataataatcgtttttagaggtaatatatgtcatttacaaaagaatttacttggggcggcgctactgctgccaaccaatatgaaggtggatatgatgaaggctgtaaaggattaaatgccgttgacgttttaactaatggttcagcaactgaaccgcgtaaggtaacttggaaaaagcctaatggtgaaactggagctacgcctctagtttgggggcaagaatttagtctacctaaaggtgctgttccaactattttagacggttactactaccctagccaccaaggaacggacttttatcaccactatcaagaagatactaaattaatggccgacatgggctttgatgttttcaggctatcaatgaactggtccagaattttgccaaatggtgatgacgaacaacctaatgaagacggattagccttttacgataaagtatttgatgaatgtgctaagtatggcattgaaccactggtaactttatcccactatgagacacctctttctttaattacccgctacggtggctggaaagatcgccatttaatcgatgctttcgttcactactctgatatcgtgatgaagcactacaaaggcaaagttagatattggcttacttttaacgaaatcaacgccatggacatggctccttatatgggtggcggtttaatcgatggtagcgaacaaaatcgtgctcaaggtgctcacaatcaattcgtagctagcgctaaggtagttaaattagcccatgaaattgaccccaacaaccgtgttggccaaatgctagcttattctgcctactacccttacacttgtgatcctgctgatcaacttaaagtgctggaagccaagcaagagatgctcttctacagtgatgttcaaactggcggccgctaccctaactatcgtcttaagaaatatgaacgtgatgggattaagcttaatgatacaccagaagattatgaattaatcgctaaatatccagcagatttcttaagtttttcttgctatacctcaaacgttttaaccactcatgaagctgatgctaaagctaacggtaatgtttctgctggtggtgtagttaacccatatcttgagagtaatgcttggggctgggcaactgatccagatgttttacgaatcggcctaaatgagctctgggatcgttaccacaagcctctatgggtagtagaaaatggtttaggttctgctgacacccttgaaaaagatggctcaattcatgataactatcgtattgattacttacgagaccagatcaaatcaatgcgggatgctgtcacaattgatggtgtcgatttgatgggatacactacctggtcagcaatcgatcttgtctcaaatgggactggtgagatgaagaaacgttatggttttgtctatgttgatcgtgatgaccgtggcaatggctcactcaagcgttatcctaaagattcattctactggtataaaaaagctatcacctcaaatggtgaggatttagactaaaacttttatttataagtagagcctagctaaaaaatgctagactctatttttctaaaaagatatgatgaaagcataagtaatatagatgagagaaggaaaagtatgattacaattactaaacaattcaacttcaaggctaaggatttctttgattaccttgaagaacaattaattcctgctattaaaaaagctcgcggtaatgacatgccggtaacgcttgctaaaggtactaaatacgaagtagatggtgcccaagtaaaattaaccgattacgaaagaaacaaggtctatggggctcattttaagacagatcgaatggaattagtgattaattatgtcactgaagacaacgatcaaggtgtaaaaatcaccttttctgaagacatgcttagctttgaccgtgagaaacacggcaaactacaaaccatgttttacaatttccaattaaagatgggcgcaaagaaagaattaagacgaatgggtgacaatgttttagctaatattgcagcttaaaatcgccatctcagcagcaaaaagaccataactacttctaattgtgttgtagttatggtcttttttttgttcaaattaacaatcttatctatatcaaaattaatctattagttcttagtagcgtcagcctgttccttcttcaataagacattgtcatagtgcttgatgaataggaaccaaactaagaaggcaacaagtgcacaaacaattgaaagcacggcaccttgccagctagtagttgcaagataaccactcaaacccactggagttggccatggttgttgcacaataatcttaggtactaaatgtgaagttactgcgatgtaacccaccaagccagaagcaagtggagcacaaatgaatggcacaagcaagttaatgttataaacgattggcaaaccgaataacaatggttcattaatattaaaaatggcaggaaccaattcaaccttaccaatttctttcaattgagctgaacgagaaccaaaggctaaccagattgccatccctaaagtagcacctgaaccaccaataattacaaaggagttcatcggatcacctgcaaagaagtgattagcaccatttacattagcagccatattagctaaaacaattggagtatagaatgagctcatgatagtagcaccatgaattccgaaccaccataagaagtgaatcaagaaaattataatcaaaaagccccaccaagtatcagcaattgcactgataaatgagaatggaatgtaaagaacttggaaaatatcagttcctaaagttaccaaaattagttcaatcaatgcaactacaacagcaatacaaaagcctgggatcaaagcgctaaatgagttagaaacaccagatggaactgatgcaggcatttttattctccagttgtgcttaacagtgtaacggtagatctgaactgtaagccatgcaattactaatccagtgaagataccaacggcagcaattctggtaataccatttgttgaggcttcataaccgcctgccaccattttagtcttagtaaatgtagtaatacgcatggtgctagttaaatcgttttagttaataaaaaagtccaatcttgttagactcgacttgtaaatagtaataatagaaaagagtctgatctgattgaactgccttaagcttaagcgttttagccaccatttacaagttagttttaaagatttagtgataatttgtcggcactggtatcgtttgtatgcaccggctgagtttactcatcggcgaaatattgatcaaattaaaactacggacagtctgattttggctttacttatctggcaagctaagacaggaattgaatcacaaagaagattctgtgaatgtttcaattgtttatcacactcacgttttaatcggcgttcacgtcagctattgcaattgatttatcagatacggcaagaaatgaataaaaaggttgacctgaatggacatttcttgatcattgacagctttccggtacctgtttgccaaccaattcgcaactatcgtgctaaaatttttcgcggttatgccaacattggttataaggccaccaagaaaatttacttctatggtttcaaagttcatgccattgttagcgatgacggttccattcttgattatgtcgtaacaaaagcatcagttcatgatgccaaggagacagttgaactgctggaaaatgcccatccatctaattactatcttcttggcgacgaaggctatttaggcaaagaactgcatcaacagctaaaacaaatgggttatgaactttggacaccatatcgtaaaaatatgacaggagctaaaaagcacaatgatcatcaattgatggctattcgcagaacaattgaaagcgacttttcgcttctgacctattataatgccgagaacaatcgagcacgtagtctgataggctttcaaagccggttggaaattgcaattttagcttataatttggcttattgtctagaaagatttaactagcaccacgcgtgtagtaataaattgaacagcaccatttttccaaataagttccggaaaagtaatgaagaatgccattaagaacatcatcaaaccgttcatcggtaccaaatcaattttctcttctcttcgataaatatccgtgtatgaataagcaaaagtacctgcaaatactaatgccaagatacccatagtcgagttgtaaactacttggaataagccactaaagcgtcctaaagtattcgcataaaatgcggcaaatcctggaattggaaatgcttgaggcagcacattcaaaattaagaaaactgccccgataattgaaaatgaaataacgctataaccagcgtccataatagctctaacaaaacgtgaacctgcaaatttacctgcttttgcagctagcgcatctttaaaagagccagattttgaatcagccatatttctttcccccaatattctgaaacatcattaaatctgaacaaccttattatagcgaaagcgctttctaatgtaaacgctttttattgacatacgatatattttgtttttttaaaatgtatatttttgaaattacttctaataaaaaaagttcatgtaactttacatgaactattgttggtgcttcttaaaagtctctataaccttgtgataacgatcttgatcattcataatttgatgaattcggtattcgctccaaacacacaataaaatgccagctaaaaacaaagttgtcataaagaacataatactttgattttcgatgaatgggaataaatacttacccaatggcaaaaacgtcaacattataaaaagcaaatttaaagctgcttgtacttcaagataaactttgctaattgggacctctcgttttcgattatgcattttagttaactgctcaatcgaagcaatcccactataaattgtcataattgccgaaacaataatgccaagaacactatgataatttacatcaataattagccacatcaagttggtaaaaaagaaaatagtaataatatatctaattaacaaatatcgactaaaatacatatacttaatgctatcttcatgtcttgagactgtaaaatagtttgtgtaaggatgaatgattccttaaatttatttctttaaacattagaaaaaggagttcctttctcgtatgattggtttgaacaaaaaaaacacatacagaaagaagaactccttcatgaatgattttaccaaagattttgctcaagctctattcaatccagacaaaataaatgatttattgcgcaaagaactacaacaggctgttaataacttgctagaagctgaattgactgcctttctgggctatgatccctatgccagaaatggctggaatactggcaactctagaaatggtgcttatttccgcaaagttgatacgcaatttggcccaattgaagtgcaagtgcctcgggatcgcaacggtcaatttcatcagcacacgctgcctgactacaagcagcactcggatatcttggaaagcatgattatcaagctttactccaagggcgtgaccaccagggaaatagccgatctaattgaaaagatgtatggcagccattacagtccagctcaggtatcaaatatttccaagcagatgattccaaaggttgaggcttaccacaaacgcaagctaagcgacaagtttttctgcgtctatttggatgcgacataccttcctttgcgccgagaaacgtttgagcgtgaagcagtctatattgccattggcattaaacctaatggacataaggaagtcattgactactgcattgctcctagtgagaacattgaagtctggacagatatgcttcaaaacatgaaatcccgaggcttaaagcaagttgagctttttctttctgatggtgttgttggcatgaaaacagccttgaccaggacttatcctaaagctcattttcaacgctgtttggttcatgtcatgcgcaatatctgcgctaaagtacgcgtcgacgatcgtgaaaagatcatgaacgaattcaaacaggtgcatcaacagacaaacaaagaagaagccacagctgtcctgcatgacttctataccaaatggggcaaggtttacagccatgttatcagaagcttgaaagacatagaaccagatctgctggtcttttataactatcccaagcagatcagagcttcaatttattcgactaacatgattgaatcatttaacaatgtgatcaagcgcaaagctaagcctaaggcagagtttccaactgaacagtcgcttgatgcttttattggtattcaggcaatgagctacaatgaccgttatttcaatcgaattcataaaggctttggtcaggttcaggacaccttagaatcctactttgattaaataaataattaaaaaatcaatttacgagaaagaactatttacacaaaagatttgacagtttccatgtcttttcttagccgtctctgtctgttcttttttaatgttttgtttattcatttttcttcgtctcatttcttgcctaataattatatttaagcacaaatcaggcaaaaattatcgaaaaaaaataactcccgcattcgcaggagttattttcattttcagcgattacttatcttcttttttaagagagccagattcatacagcttttcgtaaagatcaaccatttctccagctaaatctctaaaagtgatagcattcatcaagtgatcttgagagtgaactaccaacaaagttacatgcatgtggtcgccttgagcttctttagttaacatgccggtttgtgaattgtgagcttcaagaagtgatttgtcactttccttcaacttttcacgagcacctgcaatatcgccttttttagccaagcgaattgcttcaaaggctaaactctttgcattaccaccattggcaattaaacccatagcagccattaaagtttcttgttctttttgttctggagttttcttttcttctgccataaaatctgtctcactttccttagctattttagctaattaattattcacctttgatcaatttttcagcttgtgccaaaacgttagcaccattcatcatgccgtaatcttgcatattaattacgtctaaaggaatgtccttaccgtctttacccttacctttaaccttgttttcgaagtcactcttcatgtaacttacttgaggccccagaagtacacaatcgatttcttgttgtgccatcttgtcatcagcttctgatgctgggcaagcaaagatttctgcatcaataccttgttccttagcagcagcttgcatcttagttactaagagtgaagtactcataccagcactacaatttaacatgatagtttgttcagccataataaatttcctcctgaaatttttattttatagtttaattagcttttattgatctacaccaattattataaaacgctttcattgatttgtaaacaaaaaattatacatgcacggcttagtcttaccatgcttatataatcatctcgagcaaaagatatatacttttatctcctgacagcgaatattatatatcctttgtaagcattttcaaatgcatattctcaacatgttaagaaaaatcctttacatacgcatgatttaacataaaaaataaatcatttttagcaaacgctttcaattaataaatgaatactgttagaatgtatatgtaatttattcctttacaatagaaaggaggcagaatcttgagtcgctatcaagacattgccaatgatatagaaaaagatattattgagaaaaaatatacaagaaaactacctgaacaatttgaactggcccaaaaatatcaaactagtcgggtcacagtcgttcacgccttaaagattttacaaaataaaaaattaatacggactgtcaagggacatgggacctttattacaagcaagtctattcccgacatttttcttaattctgatgtcaatgagcataccggctttactcgtcatgtcaataatgctctcgcaataaccagtaatgtgattgcctttaacattcgcaaacctagtattagtgaacgaaaagctctttgtttagaaaaagatgacgaagtttacgatattattagacaacgaattttaaataagaagccagctaaactagaatataccgtgatgcctgttagccgcatccccggtatcaccctagatattttgcacaagtcaatctactcttatattcaaaatgatcttgggcttaagatcggccgagcagatcgcattattacagctgaaaaatctgatgcatatgatatgaagtatcttgaatgtaaaaatgatgatcctgttttatgtattcagcaaaaggcattccttgaagacggacgaccttttgaaatttctgagtcacgtaatcgctatgaccgtggtgatttaacagttaatggcaaataagtgttacttgattaaaaaaatcaattatggcaaaatggctctcgtaagcgtttccaattacatacaagaaagtgaggaaaaatttaatgtattcagcaaaaatgcctaaaaactttttatggggtggtgcagttgctgcccaccaacttgaaggtgcttggaaagaaggaggaaaaggtacttctgttgctgatgtaatgaccgttggttcagctactaggccacgtgaaattactgacggtgttcttgaaggcaaaaattatcctaatcactcagccattgatttttatcatcactacaaagaagatattaaattaatggctgaaatgggcttcaaggcttttagaacttcaattgcctggacaagaatctttcctaatggtgatgaagccgaacctaacgaggagggtttaaagttctatgacgacttattcgatacttgtcatgaatacggcattgaacccgttattaccctctcccactttgaaatgccttttaatttagctaaaaactatggtggttttaccaaccgaaaagtaatcgatttcttcgttcgttttgcagaagtttgcttcaaacgctacaagaataaagttaagtactggatgacctttaacgaaattgataatcagtctgcattcaataatgatttcttgatggctactaactcaggcattttgttcaaagatggcatgactgacagagataaagaagccgccatgtatcaagcaggtcactatgaattggttgcttcagccttagctgttaagattggtcacaagattaatcctgatttccaaatcggttgtatgattaactactcacctgtacgtccgctcactccatcaagtgatgatgtccttttagctgataaatgggagcaacgccgtgactggttctcagatgtacatgtttttggtgaatatccaaatgcagttgaagcctacattgaacgaaatggctatcgtcctgatataactgatgaagataaaattgtcctaaaggaaggcaccgttgactgcgttggcttctcctactatcagactactaccgtttctagcgaaaaagttaaacctgatgaattaactgatttggctaaagctgttgctaagaatccaaccttaaagcgtagcgattggggctgggaaattgacccagaaggcttaagaattgcattaaatcaattgcaagaccgttaccacaaaccattattcatcgttgaaaatggtcttggagcttacgataaagttgaaactgatgggtcaattcacgatgactacagaattgactacttaagaaaccatatttcagaaatggaaaaggcagttgaactcgatggagttaacttaatgggctacttaccatggggctgtattgaccttgtttctgcaggtactggtcaaatagataagcgctacggctttatctacgttgataaaaacgatgctggtgaaggtacattggctcgttcacgtaaggactcattcttctggtacaagaaagttatcgaatctaacggtcaagacttagattaattaaactattaatagcaaaaaactgatattcagactttaatcattgaatatcagttttttattttataaatatttactgccttctttaatactcatttagctaaatgctctcgatgcagttcaatgaagttacgcacccaatctggattggtcttagagtaatcacgcaaagcccagccaattgccttattgataaaaaactcctgactatcaagattattttcaataattttttgtaataacgcggtgttcatcttctttttacgcaataattgatgctcaatcgcgacccttcttacccagaaatctggatcgtgcgaccacttgagcattagatcgtctactcgattatccgttaagccaacatagccataaattttgattaatgagtcaatcgtatcccaccattgctttgttctaacaaaacgctcaattttagctaaatcatcaaaaacaatatactttttcattgccaataaataatcacaggcaaaatattgcaattcgcgttgttcttcatcccatgcctggtctagcaacttccagtcaacttcttttttcttcttttcatctttcaaaaaattatgataaatcgccctacgttctggtgtttgtaggccatagaatagaaattgatttcgcatgtaaccaacaagatgattggccttttcttcatttgctcgagcgctaaattctttttttaatgtttcaatattcatgttttttattttagcacaaaaagaggtcccaaattctagagacgcttatcgtaaaaataatcatctacccgatcatttcaactaaaagcttggtagaataaaagtatctatattaagaaaggcataaacaatgaaacaaatttattttaaccatgatggtaatatcgatgatttagtatcttatctgctcttactacaagcaccagatatcaaacttttaggtgttggtgcaattgatgcagacggctacattgatcctagtgttgaagcatgtcgcaaaatgaccgatctttttaacttacgtggtgatgatttgactattgctcgttccaactcacgtgcagtcaaccaatttcctcacgagtggcggatggcaacttattcatttaattatcttcccatgctcaatgaaagtggcaagattgatacgcagcaggcaaagcttcctgctcatttagacatggtcgaaaaaattaaagaagcagacgagcctatcgctttagttatgacaggtccgttaactgacctggctcgcgctttagatgtcgatcccgacattgagaaaaacattgaaaaactttattggatgggtggttctcttgatgggcacggcaacgttgctatggttaacgctgacggtagtcaagaatggaactcgttttgggatccatacgcagttaaacgcgtatttgaatcaaatattccaattcagatggtcggattagaaagtacggaagaattaccacttaacgatgagttgcgccagcactgggcaagtttacgcaaatatcctgcaatggacttgataggacaaggctatagtctaatcgtatctataccatcagccgaactctacctttgggatgtgctaactacaatcagcgcactatatccagaagttgttgaaaccgaaacggctaaagcaagagtcatcactgatgggttaagtgcaggaagctttgtacgggatcctaaaggaagagaagtaactcttgttactaaagccaataaggatctcttcttccaaaagatggatgaaattttagaaagaaaataacaaaaaaagaggctcacgcctcttttttatattgccttaattgactttttgtaaagaattaccgcaatccaaactgaaatgaatgatggcagtatcgcaactacaaacaaatttggatctaaaaaattacctactctgatgaagtttgtaattgaagtaatatgttttatgttactaaatatcgcttgataaactgtaacatatacgcgtggtgctagttaaatcgttctagacaataagccaaattataagctaaaattgcaatttccaaccggctttgaaagcctatcagactacgtgctcgattgttctcggcattgtaataggtcagaagcgaaaagtcgctttcaattgttctgcgaatagccatcaattgatgatcattgtgctttttagctcctgtcatatttttacgatatggtgtccaaagttcgtaacccatttgttttagctgttgatgcagttctttgcctaaatagccttcgtcgccaagaagatagtaattagatggatgggtattttctatcagttcaactgtctccctggcatcatgaactgatgcctttgttacgacataatcaagaatgtaaccgtcatcgctaacaatggcatgaactttgaaaccatagaagtaaattttcttggtggccttataaccaatgttggcataaccgcgaaaaattttagcacgatagtttcgaattggttggcaaacaggtaccggaaagctgtcaatgatcaagaactgtccattcaggtcaacctttttattcatttcttgccgtatctgataaatcaattgcaatagctgacgtgaacgccgattaaaacgtgagtgtgataaacaattgaaacattcacagaatcttctttgtgattcaattcctgtcttagcttgccagataagtaaagccaaaatcagactgtccgtagttttaatttgatcaatatttcgccgatgagtaaactcagccggtgcatacaaacgataccagtgccgacaaattatcactaaatctttaaaactaacttgtaaatggtggctaaaacgcttaagcttaaggcagttcaatcagatcagactcttttctattattactatttacaagtcgagtctaacaagattggacttttttattaactaaaacgatttaactagcaccacgcgttaacatatattaacgaccactgaatataatattctaccaaagtgagtgtagttgtcgaaaacttaaaaattttgctagccagtcgcatcccccaataaacaaaaacacctgaaagtacaacaaatgctgctaacagcaaaaacaagtttcccaaattaacatggtcccattgactcatgatcaaatacgcaattaccatgaaaattaagaaattaattgttgaacaacacagctgaatgacaaataaaattgcagcctttaagaattcaaacttgtgctctgatctgaataacaaaaatactactagaataattgcagcaacgatgaaatatgtattaacgtgcacagttatctcctactttgcctgttttaaggcttcgcttgtagcctctttaaccccattggaagtaaatgttgcaccagtaacagcgtcgatatcagcagattgtttatccaaaatttcctgctttaatgttttttctgctttttgaccatactgcggcgtttccgtagataaatctaaatctacagttgaaattttattatcagctacagttaatgtcacacctacaaagcctgccatgccgcgtgcacgggcactatatgttccttcttttaacatcctttttcctcttttttataaaacaaaacattctaagctaaatagtgaattagttatccgacgggataattgattcactatttttattcttttgtagaattaaagtagtagtaaaacgatatgccctgaggtctttagacacttgatgtcgcataataaactggcagttttacttaagttttcaatagtctcttcgaagaatgtggacactagatgtcgagtttagaaaattagatctgatttcttaagtaaatacgttttactactaagttttggaggtttttattatgcaagttacttttggaattgatgtaagcaagtctacttctactgtttgtgaactaattggtgaaagcaaaaatgaactaaccattactaataatcgtcctggttttattcaattgcttcatgaattaaccgctttttctaaacatccgcaaattatttttgaagctaccggtgtttattcacgtacactgcaatcttttctggaagactatggctatgattatgtaattcttaatcctcttaaagctaaaaaagaaatggatatgggactacgtcataataagactgataaaactgatgcttatcatttagccttaattcaaagactatatcatcatccaattaatcaacttcaatctcaaacttataagcagcttaatgctttgagccgcttctatgaccagttaacagctgacttagtaatggctaaaaatcgacttcaccaagctctacaatcgacttttcctgaaattgaaaatctattttcttctgctaaaggtaaaaattactggcaaatagttgtgcgatatcctcattgtgacttagtaagaagagaagataaaaaacagcttattaactggttaatgagcttaaaggggattgcttttaaacacgctctaaggactgcagataaattaattgaattagcttatcaagcttatccagttgtatcttgctctagcatagaagtcgagcaagtgcagtattatgcacacagattgcttaatttaagtgatcaaagagaaaatttaatcgcaagaatggttaagttagcgaagtctttgcctaatcatgatttagaaaacctagaaagcattccaggctttgcacagaccactgctgtcagagttttagcagagttaggagatttacgcagatttagtaatcctaataaaatcaatgcttttatcggaattgatccaggcagatatcagtcaggagaaatggactctaatttaagtattactaaacatggcaatgcagtcgcacgtaagttgctttatcgagctattggacaaattgataatgcagctaagacaaatccgtgtcatatagcagattattatgaaagcaaaaagctatcctctcaaaccaaagggttcaaaaagatagctattgcttcaattcataaactaatcagaaccatttatgctctgattatcaatgatcaactatatgattacaacgtagccacacataaccaaaaagactttagttgtaattaattgatcaagtacattataacgctaagcccataaattaaatatagaggtgggcttatttagtatgctttctaaaaaaataaatcgccactaaaagatactcatgacaaaatttaggtaaaaaataaagccaaacaccttattgcgcttgactttacgtagaaaaatactgctatataataaatataacagtattcctaaaaaaagccacaaagatattgtgtttagtatatcatattgatatactatctcttgggtcttgattgtttttataagcccttattatgacccaagtgcaggtagtagaatccccttctacctgttttattataccacaataaataactgatgttatataaaatcttaagttcttttgaaaattttctcaaaagggcttttttcttgcactatcctttctaagttacgttaaaattgaaatggaattataaagttatatttaaagaaggtaaagcatgtatccagataataatattcttacatatttaaaatggcgtggtgacgttgacttctcaacatcgccttttaatgatattgatgcacttgttttatctattttttcttatcttgaattaccaggtattgttaaaagtaacggaacgacaattagtttagagaaggctgccaagctctattttgcagatgatcatcctcgttatgataatttgcaataccaagaactatttaaattaatggctcatgcagaccgctttaaaaatgcaaaactgtcgtattttattagtaccttaactgaacatactcaatttagtgcaatcaaaattgaactaactgatgggaccaactttattgcttttcgtgggactgacgattcactaattggctggaaagaagattttgaaattagttttaaaatcactgtagcccaacaacaagcagtaaaattgctcgaaactattctcaaagctgatgatcaagattattacttaggcggtcactcaaaaggtggcaatttagctgaatatgctgccattaatattgagcccaaattaagaaaaagaatcaaacgtatttatacctttgattcacctggaattgcagaagaagttggtgctcagctccctaataagtatttgcaaaatactctacgccgctttgtgccagactttagcgtcatcggtcgcttgtttgagtcgaaaaatattccagccactattgttggtagtactcgcaagggactaagccaacacgatgctttttcctggcaaataatcggttctaacttcgacaccagacgccaccgcaatgctcaatctcaagtatataatcaactaatcaatcaatggattggtaacgccaccctagaagaacgtgagtctttaactaatgacctcttctctgctttaagctctagcggcgcaactaagatcaacgaacttgataaaaatggttttggcggttttggtgcaattttgttttcactggctgattcatctcggcgaacccgtttcgtctttggttcattattttccagcatttggcagacgatcaagagccagcaactgaccaaagcgcttttctcaacagacacaattgttggttgggtgctggtagtattcggaatcattagtctaactctaccccaatatgcagtgcgagcttttggcgccctagttgccttcacggggattggtttcagtgttcaccaaattttaacaacggcaaaatctagtctaaaagaccgacaaaaaaacttctttattatttcgtatttagtagtttttgctttatcaaccgcgttaatttctaataaccgtctactaattttcttagctcactacttcttaggactattcttaattatctattcctacattcgaattaggcaactagtctttcgtaaattacccggaatttttcagattactattgtagcgatcgaggcattaattgcttttgctttaggaattatcgtagtggttaaccctagtgcctttaatcggagagcaattattattatcggtattttgctaattgcttacggcttcttcaagttagttggcgaattatttggccagcgcagcaaaatgcccaaaaatcatcgttaaaaaaagcttgttaacttcaatatcagttaacaagcttttttcttagcccttaataaaggtattagcctttatatgctttaaaatgttatacccgattgcacgaatatgatttttactaccataagtttgattcaaaaacattacaattccattctgattatcagtagtcagttgcatccagttaacaaagtgggtatcaccaaaattgccataagcgacttttaaagtttgattctttttcagataaaaaccacctgagtaagtattaaccttagaacttaaatgaccaagataatggaactgttttttagtcagaatcttgccattttgcataccagattggattttataataatcattagccgttgaaaatagattcccagcaccaggcaattgagaaacaacattacgattagcataggtactagcattgtaatttttaccaccagaataaagatatgaaatcgcatcagtctttgaccgcggaatttgttgataaatataggtttgcttcaacttcaatgatcgaataacccgctgtttcacattagcagcataagactttcccgttactttactgataatgcctgccagcaaaacatagttagcattattgtaattaaatttactgcgtcccgtattttctcgtgcattggcttgggcaattgtccaattgatcgcgccattttcagaaaaattaactccatgattagattctgttccaattacgttaattcctgaggtatgtgtcattaactgccccaccgtaatttggtttgcatgcttcaaatttggataccagcgtgaaatcttagtattctgattgaatttcttctggtagattaactgtgtaattattgcagcagtaaccatcttttgcaaagaaccaactggataaagcaattttgtattgccatttttcagtcgtttgctgtaataaccgtagcctaagctaacacgttgagcatgcccattttttacaatttcaatgcttcctcgtaaatgatgctttttcatcatcttaagcgtatattgccgtagttgcttatttgaataactcttcgcctgcacagcatgatttgacattatcaaacacgatgaacaaaataaaatgaaagctatcccgaacttttttagtgtcttcaaaatttcaatctccttttaatcctgaactattctaccacaatcaaaaagcgcaaaatcacttttaatcatggtttgcgctttcatttttatttttttaaatttttatagtaagttcatcttaactaggtattccgcattttcaaccgtattccatgcagcacccttaagcaaattatcggctacaatccacatgttgaaggcacccttattttcataatcagggcgaatgcggccaacaaaagtttctcgcttacctgttgcattaattggttgcggataaatttgatgtttaatatcatcttccaaaacattacctggaaaggcagcaactgcatctttaatatcttgtgccgttgcagtctcatcttcaacagtaaagtagacactttccccatgagaaattgacacaggaaccctaacacaagttgcagttaccttgatatctttggcattcatgtcatttagcatgatcttctttgtttcatgaatcatcttccattcttcatgagaatagccactatcttctaaaacatcaatttgaggtaacaaattaaaggctaatgggtaatgctttttgtctcctttagtaggtaaaatatgagcatctgcttgcatgtctttaccatcaaggtaatcttgactttccttttttaattcatcaattgctgcttgccctgctcctgaagcagcttgataagtggaaacgataatttgtttcaaaccaaattttcttcgaactggttccaaagccattaccatttgaattgttgaacaatttggattggcaatgatgccgtgatgctttttcaatgcttctggattaacttcaggtacaaccagtggtacatctggttccattctaaatgctgatgtattatcaacacagacagcaccacgcttaacggcttccggcagaaacttctttgacactgcaccaccagctgaggaaagtactaaatctacaccatcaaatgatcctggtgtagtttcttcaactgtcaaatcttgatccttaaattttaaaactgtacctgctgaacgtgaggatgcgagtagctttaagcttttaactggaatcgttgattgttccaattgttcgatcattcttcttcccacggcaccagtagcacctagaattgcaacattatattctttcaccattatttttttcctcgcaaaaaattcttcattctttccatcgcttcatgtagattttcatcactggaagcatatgacattctaacgtacccttctccaccaggaccaaaagcactacctggagtaataccgacttttgcttcaaatgctaaatccagtgcaaattgcatatcatttttaccatatttagctggaatcttagcgaaaatataaaatgctccctgtggtttaactgcttgcatccccatcttagctaattcatccaacacaaaatcgcgccttctttgatatattttgcggtatttttctggatcatccaatccatgctccaaagcttcagtcgctgcagcttgagaagagtcagttgtagtcgtaaccattaaaccatggactttaccaatttgttccataatttttgccggaccagctacataacccagtcggtatcctgtcattgcatgtgacttagataatccagaaatataaattgcccgttcaggaatcacacttgcaattgaaaaatgcttaacgccataagttaaagtactgtaaatttcatcagtaattacgtacagattgtgtgcttttatcacttcagctaatgccctaatttcgctttcggtgtattcaactcctgtcggattaactgggtagtttaagataaccgccttgatattagattcttccttaagtgtactttctaatctttctggcgttaatttaaagttatcttctgacgtgttcattaatacataatctgcatctgctaaagttgcaactggccaatatagtgaaaataccggtgtaggaatagcaaccttatcaccccgattggtaattgaaaatagtgtcgcattaattgcttcagttgcgccaactgtaaccacaatttcagtttctggatcgtaaactactccacttgcttttttcaaataattgctaattgcttgcctaagttccaattttcccttttgtggcgcatagtgtgaatcattatttcgaatactttcaattgcagctgttttaacatgctcaggtgtattcatatcaggctcacccaaagtcagcttgataattccaggaatggttgaaactttattatcaaaaatcctaatccccgaagccttaacagattgaatcttcttacttaaagctaagtcatttgctaattctggcataatttttcctcttataaaatattctctaagccaataactagttcagttaattgatctactttttctaaagcaactttaaccccactcataaaggaatcacgatcaaatgaatcctgtctaatggttaaagcttcgccaggtccaccaaataaaacttgctcatgtgcaatatagccaggtaagcgtactgaatggattttaattccttgataatctccaccgcgaacattggctaaagtctcagtttcatcaggcgcagtttgatgttcaggacgattttgcgcgatcatttttgcagtagctaaagcagtgcctgaaggtgcatcttttttatctgcatgatgcatttcaataatttcaacatcagggaaatacttagcagcttcttcagcaaacttcattaataaaactgccgacattccaaaattaggtgcgattaagccacctaatttttcctttttggctagttcaatcaaagttgcttcttgatcatcactcaagccagtagttcccacaataggtttaatttgatgcgttaaagcaaaataaacattgtcatagacagctgcgggagtagtaaaatcaatccaaatatctgcagcatggtcaggaatttgacttaattggttaaaaatttgggctgttttaggtaaatgatatctttcaggctcatttactgcctttggagcaaatccagccaccaattcaaaattgggcagctgattaactaaactaacagccttttgccccattgcgccagtaaacccagctattagtacttttttaggcatctcgtcttaccaatcctttcctaaattaagtggcaacttttgcatcaatgcattagcatttaaacctaaatgctgggccaacttttctttttcctcatcacctaaagcgactaatggcaaacgacatccccctactataaatccttgagcattcaaggctgccttaacaggagctggtgaaggatacataaacaaagcctgcattttcggcgttaaccagcgttgaatcgtgcccgcttcaggataatttccttcataaagatcatcaaacattcgccgcatttgtttgcaatataaatggctagctacggaaataacgccattggctcctagtaatcttgcaggtaacgcttgcgtatcttcaccactaaataccaaaaaattaggatctttatgatcaataatgtattccatttcttctaaagatgcacattgtttgattcccttaatatttttaaggcgtgataattggactaccgtttctttttccatttttacgccagttctaccgggaatgttataaatcataattggcattttagtctgagcattaacagcactaaaatgtgcaatcatgctacgctgatcaggcttattgtacggtggcactactactaaggcataatcaattcctttaatctgtgctacctcattggtgaaggcgatagtggttgcagtgtcgttactgcccgttcctgcaataaccggaacacgtccattaacaatttgaccaaaatgctggtacaagtctatcttttcatcatgagtcagagttggcgtttctccggtcgtaccaccaactacaaagccattgcaaccttggtcaattaaataattaaccagcttttctaaactggcaaaatctattttttgattctcatcaaatggcgtaacaatcgccgttaacaaatctgcatcaattaatgttgccattttattgcctcattctattaatcaaaaatcctttgattgcatcaacgccgcgctgaatgcttttctcatcaggattaagtgtagccgtatgcaattgtgaatcaggattaccaacacctagccaaaacattgttccagggaatttagtcagcaaaaagccaaaatcttcacccgtcatttttggttcagtagtaataaagttaaccgtcggctggcttttcatatatgaaataaagttcttggttaattgtgggttattttctactggccaatatccaccttgattcaagtctaacttcacttctacaccaaagcttttctcaataccaagacagatttctttgagacgttgatcgattgtcaaaatcatattttgagttaagccacgaatcgtgccctcaattctagcttgaccagcaattacatttctaatcgtaccagcttcgattttgcctagagtaataacaccactttgaattggatctatgcttcgtgaaataatagtttgaacctgcatgatcaaacttgctgctgcaactaccgtatcatttgcatcttgcggaaaagctgcgtgtccacttttacctagaatatcaatattgacttcagttgtaccagcaaaaagtgtacccatccgacacccaatgctaccagcaggcaaagcggggttatcatgcaagccatagaactcgtcaggtttaaattgatcatgaaaaattcttttttcataagcttgcatcccaccactttggctttcctcggctggctgaaagaaaaaaagcaaattatcttgtggctgattttcactaaaatagcttaacaaacctaatgccacggtcatatgaatatcatgtccacatgcatgcattactccctcatgttttgatgaaaatgccagtccagttttttcagtaactggtaaagcatcgatatcagcacgatatcctatcgttctgtgtggttttcttcctttaactaatactagaattgcggtaggcagtgtcgacggtatctcaacttccaaataatcttgcttaaatttttgaattacctcgattaaataatcatgtgtttctttttctgctagtgctaattcaggtatttgatgtaaatgccttctaatttgaattaactcactttcacttaaaactgacattttataactttctcagattatcttctagttccgtcttactactagttttttcatcaacttttttaataattttagcaggaacgcccgctaccatcgtatgtgctggcacatcatgagtaactactgctccggctgcaataacggctccttcacctacatgaacaccctcaatcacaacagcattagccccaatcatgacattatcatcaatttgaaccggtttagctgaagcaggctcaattacaccagccaatacgctaccagctccaatatgacaatgttgtccaacaatggcacggccaccgagaactacgcccatatcaatcatggtattagccccgatttctgctccaatattaataatggcacccatcataattactgcattattaccgattaccacttgatcacgaataatagctcctggttcaattcgagcattaacttttttgaagtccaataaaggaactgctgaatttcgtgcatcattttcaatatggtaggccgtaatttgatgattttcttttaaaaatggttcaatatctttccagtcaccaaagatcgcgccagaatgagcttcagtaaaattctcaatttcctttggaaaatcaatttgtgctaaatctcctttaataaagacttttaccggtgtcttttttggtgcattaccaatgtaatcaataatactttttgcatctaactttgccatcttttttctcttttctaatttaaatatgattgatctaaatgaaccaagtcttctaaactttcacgcttaatgactaattttgctttaccattttctgcaaataccactgctggtcgaggattacgattataatttgaagccattgaatacccatatgcacctgtatccaacatcgctaacaagtctccagctttgacttgtggcaaagcttgatcttctgctaatatatcgccactctcgcaatacttaccagcaatacgaacatgttcagtcaaaggcgcttgtggatcggtggctaaaactgtttcatacttagcctgataaagtgcagggcgaatattatctcccatcccgccatcgacagtaatataagaacgataacctggaatatccttacggctacccaccgtataaaggttgtaaccggctggaccaacaattgatcttcccggttcaatatcgatttcaggtaaaggataattcattttttcagcttcagttttgatcaccttaacaatcgtcttaacaaattcttctggtcgtaatggatgatcttcttgggtatatttaatcccaaaaccgccaccaacattaataacttgtgcaagatagccatacttttctcgccaatcttgcgctactaccattaatttttgtgctcccatttcaaagccgtttaaggcaaaaatctgtgagccaatgtgagcatgaatccccaacattttcatcctaggattagctagaacttgttttaatgccttttctgcttgacctgattcaagatcaaagccaaatttactatcaatctgacctgtttgatcatattcatgggtatgtgctgaaatccctggtgcaatacgcaacatgacactaatcgtagcatcgtacttttttaaaacttgcgccaataactgaatctcatgaaaattatcaataataattttgccaacatgattttttacagccatttccaattcagttaatgatttattattaccatgaaagctaactctctccattggaaaattggcttttattgcagtaaataactcacctgctgaaactacgtcagtgtatgctccctcttctgcaataacttgatacattgcgattgctgcgaaagctttacttgcataactaacagcataggccatgttttcttcttcaaaaactttcttaaaagcccgaatttgtcgacgaatttgatcgacatcataaactactaatggcgtaccatacttttgagctaattctactatatcaactccaccaatcgttaaatggccttgctcattaatctgatctactgcaatttgtgaattcattttgttctcctgtctttttcaggcgaaacgctaataaaaaatccattgtctgcgccaaacaaacaatggattaatttctacttaatctatggtcgatagcgctccgcgaattttgttcgcgacagtccgcagtttattcaactacgccccagctcaagcctttagcatgactcagcttcggcaacctccccttttacaattcatcttcgttttgcccaactcagaattgttacttatgtcggctgcgcctcttcgattgactgtagtttacaattttataaaaacatagtcaacaaatttattataaaaatttaattttatttgtaacaatgcggcatttagagtgataaattacagtcatcacttgcaagattaaaaaataatgttagaattcaattaaatttagtctgacttttttatttaaattaatgatttctgaaaacaaaaggagttttgaaatgaaaatcgtaaagtttggtggctcttctttagctaccggtgaaagtgttgcacaagcaattcaaattattctcagcgatcctcaacgacaagtaatggttgtctctgccccaggcaaaaggaatacaacagatatcaaagttactgatctgttaatcaagtacgcagatttagccttaaagcacaagaattgtgttgaaatcgtgaataaaatttttagtcgctatcaagaaattggtcattattttggcttagctgatacggaattaagtattattaaacaaattttattagagttgcccaatcagggttatcctaacgaaaaatatcttttagctgcatttaaggcacatggtgaacggcttaatgctcgtttaattactttaattttacgccatcaaggaattaatagtcgttttcttgatccggctgaagccggtttaatcgtgactggcgagcccaatgatgccattgtcaatccagagagctacttaaatcttgaccaaattaaaattaaggctgatgaacgtatcgtatttcctggcttttttggcatgactccgtctggtaatatcgccactttttcccgtggcgggtcagacattaccggggctattctagctcgcggctttcatgctgatctctatgaaaattttacagatgtcaatgggatttttgccgctaatcctcatattattgagcatccccaatccatcaagaaaatgacttatcgcgaaatgcgagagttgtcatatgctggcttttctgtttttcacgatgaagcattgattcctgctattcaaggacagattcctatcaatgtgaaaaatactcatgatcctagcaatcctggcactatgattgtcccagaaaaggattttgtcccagataatgcaataaccggcgtaaccagccaaaaacatttttccgcattatatttgcataaatatttgctcaataaagaagctggtttcaccttacgtatattacaaattttataccaacataatattccatatgagcatatgccatctgggattgacgatattaccattatttttaacaatgattttctaaacgatcagttaattgatcaaatttgtaatgaaattcaagctacaattaatccagatcaactcgaatggattgaagattatgcaattattatggttgtcggcgaaggaatgcgacaaaaacataccatcagccgtcaaattatcgattctttaggcgatcatgatatttcaccacaaatgatcaatcagggagcttctcaaatttcaatcatgatcggtactaaaaaagaaaaggctgatgaagcagtaaaaattatttatcaaaagttttttaattagggggcattatgattaatttattcaaagttcacggttcgcaaaatcatttctttattcttgatcaaacacaattcgaacacgaattaagtgacgccgagctaaaaaattttacgcaaaagattaccaatccacaaactggactgcttcacggagcagatggcgttttagtagttaatcatcccgtgcattctaactcacttggccagatgcgtgtaatcaatgctgatggaagtgaagcatcaatgtgtggcaacggtctacgcaccgttgctcgttacctaagtgaaaaaacgggaaaagataatttcctagttgacacaatgaatgccagcttacgtgttagaagagaaaaagattttgcttctaacgtgccagcatttgcagttgagatctctcctgtacgctttaataaagaggcactcccttttgataatttaggacaagaacggattattgatgcttggttgccagaaatttatcctggattacgttttacttcaattgccgtacctaacccacatttaatttcttttgttaatcaagcagaaattaccggcccgatcttaggcattgttggtaaaaaattaaatagcaataatccctactttacagatggcgtcaatgttaatttcgcgcaaattttagataaaaataaactttttgtccgcacttacgaacggggcgttggttttaccaatgcctgtggtactggaatgtccgcgacttctcttgctcttactttaacccaccccgaaataggcaacttaaatacaccaatatcagtttataatcctggcggtatggttaaaactatcgtgcattatgaaaaaaatagttattggatcgagcttattggtaacgctacttttactcatcgaattaagctttctgaagctgacttaaggaaaggtgatttttccaatgtccagatccaaaagactgctgaacaaagtgcttatgaaaaatttattgctaatctgccaaagttcaatgacattacaactttagcgtaaaaaaatggcttgcaacacgcaagccatttttactttttaattattaatctaagtctttcaagccatgctttttcttggaaacgcgataagctactaaaccaaagaaaattggaccaaagcttgtccaaaaagcagttgcatatctatgctccaaaactggttgcaaaaccgtaaatataattccggtgcaaacaatcagctcaacaaagactactaacgcaaccgtccatttatagttagtaaacactctaaacttgcgcggataatcttttttaagaaagaatggaaatgcaccgatcaagaaaatataaggtgcagtagcggctacgttacccatatccgtcagaatttgataaaagctagtcgctgcgctaccaccgaatgagaccaccgcaattaataggcaaacgaagacagtttgagcccacatcgcattagcaggaataccgtgtttatttaatttagtcgctgccttaggccataaacgtggatcagatcccatgatgaaggatttaattggtgaataaagcaaaacaaagagagcacctgtcattcccatcaaaccagataaagcaattgctctagtaaagaatttaccaatcaataaactcgtgttaggatccaaatgaagtgcggttccaaaggctttgccaagtgtgccatatacggtatacgtaatatttccagtattggcattggctgctaaaatatctttttgataattaactgaaaagccggtcataaaaatcatcaaaacataagaaataatagtgaacaatgacccaataattaagcctttagggaaatctttttctgggtgtttcatactgtcaatcacaccaccgacggtttccatcccaccatatgcaaagactgcataaactacgaaagaaataatcgtaattggcgtttgaaaacttttattaggcgaaataataaaactttgccacccagtaatcggctgagccaattgcccatgattcataatcaagaccgttaaactagctagaataaagactgcattcattacaatcatgaaccaaccaccgattgatgacataattttaattccagttatccctctggaagacaggtacgttgatacaatcatgaataaaattgctagtacacctatcaattgagtaccatgcaagcccaaaatattccattcttgagttgtatctttgccaaaaataagggcagagattgaaatccaaagccttgaggcgcttgcaaccagccacagcacccagttagccagccatacaaaagtcccaataaaggcctatttttgtccaactgagccagctaaccatgaataaataccaccttgagcatcatgaaaagcagacccatattctgccatcattaagccagctgggaaaaagaaacagacgccagccaaaataaaccaaatgatcccagcatatgtcatttgctcataagaaacagaaacattgccaaaaccataaaccgttgtgataatcatcaacacaaggctcatagtcgtcaatgattttttagtttgtgaattttcatcatccaagataaagcctctactttctatttacactttccattttagcatcgtttatcttgaataaatttattctaattttaggctcataagaaaaaactactagttattcactagtagcccttcatttttattcattaattcttttttcaatccaattacttaattcagttacatgtaatttagtgaccgaactaaaagtcaaaacggtgacatgatcatagttgagattcaactttttctttaagcctgacatcaccttattagtttgactcttttttattttatccatcttggtacaaactaccaaaattgggatatttagatattgagcataatcatacatagcaatatcatctttggttggttcatgacgactatctactaagataattagtccctttaggttgggtctagtttctaaataatcttgaatcatttcgccaaattcttgccgcttcttctgtgaaactttggcatagccataacctggtacatcaaccaaataaaatttttcattgactttgtagaaattcaaagtttgtgtctttccaggctgtgacgaggtcctagctaagtttttacgctttaatagggtatttatcaagctggactttcccacgtttgagcggcctgctaatgcgatctcaggcaagttatctttaggatattgatcttctctaacagcactaactgcataactactgctttcaatgatcattgacacttacctgttctttattatcagtatttttgcggattacctttggcttagcgtgcttagtaattacgtccttagttacttcaacggtctcaatatcctcttcactaggagtttcatacataatatccataattgaattttcgataattgttctaagtccacgtgcacccatatttctttggattgctaagtcagcaattgccttcagagcaccatcagtaaacttcaaattaacatcatcaagtgataacaacttcttatactgcttaactaaagcattctttggttcagttagcactctgaccaaatccttactactcaatttatcaagcgtagtaataattggaattctaccaatgaattcaggaatcattccaaatttaactaagtcagctgtagtcaaatggcgtgtccaatcatctgcattaattttatctgcctcattttcagcaccaaagccaatggtctttttacctaaacgatttttaacgatttgttcaattccgtcgaatgccccaccaacaataaatagaatgttagtcgtgtccatcttaatcatttcttgttgagggtgtttacgcccaccttgaggtggaacagaggcaattgtaccttccaagatctttaataatgattgctgtacaccttcacctgaaacatcacgcgtaattgagacattctcagattttttagaaattttatcaatttcatcaatataaataatgccacgctgtgcacgttccaaatcataatcagcattttgtagtaacttaagcaaaatattttcaacgtcttcaccaacataccctgcttcagtcaaggtagttgcatcggcaattgcaaatgggacatttaaaatacgagccaaagtctgagcaagatatgtcttacctgatccagttggtccgatcattgcaatatttgatttttgtaattcagttgaagaatcaacatccatttggctaattctcttatagtgattatatacagcaactgataagacttttttagcacggtcttgaccaataacatattgatcaagttccttttttatttcaacaggcttaggtaattcacgagctgctttaagtgaatctgctcgtaattcatcgtcaataatttttttagccaagtcaacacattcattacaaatatatacaccgttaccggcaatcattttcttaacttggtcttgagttttgccacaaaaagcgcatttaatctcttcttgatctgtaaactgatttgccattatttttcctcctatatctaccaaaaatcagattatcataaattaactaatattgataaatattaagctcgaacagcaaaaaaagcggcctatagccgctctttttgagaaattagcaaatattactattacttgctttccttcttgtcatcgtcttctttgttttcaagctttgacttagcaacttgcttagcattatcagtaataagatccatagccttacgtacagtaatgtcgtggcctaacatgtcatctgataaggtgttacgtaccatcttttcatccatgttgtattctgaagcaagatccttgatttctttatcaatttcttccttagttgccttaaggtcttcagcagcaacaatagcttcaagaactaagttagttttaactctttcagctgcattcttttcaaattgtgaacgcaattgttgttcgttggtattagtcaacttgtagtaagtttgtgggtcaataccttgacgttgcatattacccaagtattggttcaattgagtatcaacatcttcttgaatcatagcatcaggaatttcatcgatagtagcgttgcttacagcaccttcaattgcagcttcttgaatagcgtcgtttgcttgttgttccttttgttccttcaagtccttcttgatcttttcctttaagtcatcaagggtgtctacagagtcatcaacgtccttagcaaattcatcgtctaacttaggaagttgctttgacttaacttcgtgaatcttagttgcaaagtgtgcttctttaccagctaaatcctttgcaccgtaatcttcagggaaagttacaactacatcaacatcatcgccggcttcatggccttcaagttgatcttcaaagccaggaataaatgcacctgaacctaattcaagtgagtagttttcagctgagccgccttcgaatggcttgtcgtcgatagtacccttgtaatcgatagtaacagtatcgcccttttcagccttacccttcttaagaacaagttctgcattttgttcacggcgcttgtcaagttcagcatcaatgtccttttggtaaacacgagtgttttgcttaagaacttcgatacccttgtagtcacctaacttaacttctggttctacagtaacagtagccttcatagtccaatccttgtccttatccattgatacaggaacaatttgtggttggccaactgctttaatacctgcttctttaacagcagcagaatatgcatttggtaatacaatatttaaggcatcttcatataatgcttcttcaccgtaatattgatcaaagatcacacgtgatacgtgaccctttctaaagccaggaacacgcaagtttttctttactcttctaaaagcttggtctaaacctaatttaatttcatcttgtgaaatatcaaaagtaagatcaccggttgtcttaccggtcttttcccatttaacagacattaattaaatacctccaatgtcaaatttgagtttgcatcttgcatactaagttatcttaccttaaaaggccgcaaaaaacaaatttaaaagaaaaaagatgcgctcctgtgaagaagtgcatctttttttaactatatcgttagaaattagtcaaggatttcagtaacctgaccggcaccaacggtacgaccaccttcacggatggtgaacttagtacccttttcgatggcagctggcttgattaacttaacagtaaattcagtgttatcaccaggcataaccatttcagtaccttctggcaattcaatttcaccagtaatatcagtggtgtggaagtagaattgtggacggtagtctgagaagaatggggtgtgacggccgccttcttccttcttcaagatataaacttgacccttgaattccttgtgggtttgaattgagcctggagcagccaatacttgaccacgaacaacttggtcacggtcaataccacgaagcaatacaccaacgttatcgccggcttcacctaagtcaagagtcttgtggaacatttccaaaccagtaacaactgacttaagaaccttgtctaccaaaccaacgatttcaacttcgtcaccgaccttaacagtaccacggtcaatacgacctgaagcaacagtaccacgaccagtgatagtaaatacgtcttcaactggcattaagaatggcttgtcagtttgacgttctggagttgggatgtattcgtcaacgatgtccatcaacttaagaatttgttcttgagcttccttgtcgccttgtaaagccttcaaagctgaaccacgaacaactggaatatcgtcaccagggtaatcgtattcagtcaacaagtcacgaacttccatttcaactaagtcgatcaattctgggtcgtcaactaaatcacacttgtttaagaaaacaacgatgtagttaacaccaacttgacgagcaagcaaaatgtgttcacgagtttgtggcataggaccatcagttgcagcaacaactaagatagcaccatccatttgtgcagcaccggtaatcatgttcttgatgtagtcggcgtggcctggagcgtccatgtgagcgtagtgacgattttcagtttcgtattctacgtgggcggtattaatagtaataccacgttccttttcttctggtgcagcatcgatttgtgagtaatcttcagccttagccaaacccttgtcagccaaaacagtagtaatagccgcagttaaagtggtcttaccgtggtcaacgtgaccgatagtaccaatgtttacgtgtggcttagttctaacgtaatgttctttttctgccattaaaatgaccctcctgtaaatttgcaagaagtccgttgagataagttaacggataattctctgttgaatattgtactactttcttcggcaaatgcctagtaaaaaagcttaagcgaaattgcctaacgaaaatatcctttgctaattatactaaatagtttgaaaatgtaaaccttttttacttattttttattgcggtaagtatttatatattttttctagtaatttttgatgactacggccatcttttctttgtaaaaatgagactaaatcactagcaaaactgtcaggctcatcaatatattggttaattttagggtaaagactgcctaataccaaattcacttctcccagcattaatggcaactgacttggactattgtgaaatttgcttccaatgctagaaataatttcacggtacttaggttctttttctagaagcagtgtattcgccggaataaagctctccatctggcctattacccaaatttcaaacttttcttcaagtcccaagcgaactaagtcttcacaaagtgacaacctaacagcaaaatctggcgttggatctaataagacgcttcgtgcaaaagctttaaaattaggcaggtttaacttatgtaaactttcataatccgactgagtaacctgttctcgttgtttaaagttttgcataatctgccgctgtttttcttcagaagctggttttaccttttctgataagtccaccccaacaagattttttagttgtagagcttcaataaaaaaattatttttagctagaatttgacagtaacttttaaatactcgctgatcagaaaaaagatcaggctcctctttaattaaagcatatgcctgatcttcttgtttattagcgcaatagagtttgcagagtttcaaaataacgtccaatgaatgctcttcacgtaatgcttcttctagattttgaatagctgcttcgagatctcccttacgctcatcttcttcagcaagtttcaataaattttgttggcttactgatgtcatttttagtctttcttattactttcttttttcttatttatttttttattttcgtctttggcatggttcttattgtcattttgtgctttttcattgcgtttctgcatagcacgatgacggttttgatttacttccatgaccacgggcaagatcactggacgacggttagttttcttgtataaaaacttctccaaatcaccgcggatatcttgcttcaattcagtccaatcaaactttttgtgttcaaaattggcctgaattgcttttttaattacatcaattgaatcactcatcaactggcgattagccttgatatagacgaaaccacgactagtgacttttggctctgcaataatctttttcttcttacggtcaattgtaacaaccgcaataaagattccgtcatctgataggacctcacgatcacgtagcacaatattaccaacatcaccaacaccagaaccgtcgatcatggtatcttcacctggtactgggtcagttaagaagaaacgcttctgcttaaagtcatattcaagacagtcaccattcttggtaatataaatatctttaggattcattccagctttaatagccaaatcacgtactacttcaagtaaacgatattcaccaattactggaattaagaattttggcttcaaggttgtaatcaaaagttgcagatcacgaccagttgcatgcccactagtatgtatatttctgcctaactggataaccgtaccgccagccttatataccaaatcactggtttcagctaccatcgtttcaaccgcatgtgacggagtagttgcaataaagaccaaatcgcccttatgaatcgtaatcatactatgacgcttcttagccattttttgtaatgagttaagtggttcacccatacgcccagtctctaatataactgtctgctcatctggcacagtcttcagatccttaactcgcatcaacaagccttcaggcacatctaaatagcctaatttcattgaagttctaacaatcttagctagatcgcggccagttaataagacgcgtttccctgttgctgctgcagcatttaaaacttcttgaacacgattcaagttagaggctttagcagctacgataattctgcctttagcatttctgaagacattagtcacaaatttaccaatatcttgttcagatgcattagggaaagatgcttctgcattagatgaatcacttaaaagcgctaaaacgcccttttgttcaatttcagctaagcgatccatatcagtccgataatttaacgcagctgttggatcaaatttaaagtcaccagtataaacaatttcacctgctggtgtatgtacatctattccaagtgaatcaggaattgagtgtgtcgtatggaagaatgaaatacttgcattcttaaaatcaatttcagtatctgcatcgattacgtggaacaaactattcttacggcgtttgttttcgcgttgtacttcaattttagcaagttcgatactcaattgtgaaccaaatactggaatatcgtatttacgcaaaatgtatggcaatgcaccaattgaatcagcatgcccatgtgttaaaaagatacctgctactcgatctccgtattgttcaaagaaatcaaggtcaggaattactacatcgataccaaataaagaactatcagggtactttaatccggcatcaagaacaaaaatttcatcattaacttgaacggcaaacatgtctttaccttgttcacgcacaccgctcaagatcataattttgatttgatcagccattatatttccttttctatctaatttttaattcttatggatctatcgatctcaacgtaaaaataatctgtttcaattttagcataaagaataaaattatgacagagacaaaaaaagccagccttttcggctagcttcattattcaatattatgtgaaaattaacgacgaagacctaacttcttgatcaattcacggtaacggttaatgtcgttgttttcaaggtaacgaagcaagttacgacggtgaccgatcttcttaagcaaaccaacgtatgagtggtggtcatgcttgtgactcttcatgtgatcagtcaagttgttgatatcagcagtcaaaagagcaacttgaacttcaacagaaccagtgtcaccttcgtgagttgcgtattccttcataatcttttctttttcagtctttgaaattgccatagttaaattcacctttcattaaataattgccgttaacaacgtttatcgtcggcgtgaacaaataaacagcgttagcggttcacaacagtcataatcatacacattattttttaaaaaagcaagcagaaattaccttgcatccgtgatatttcttaagtataatggatgaagtaaatttctaaatcattggaggtgaatttcatgccacaaatcaaatcagctatcaaacgtgttaaggctcaaaatgctactaacgaacgccgcgcttctgaattaagcaagttaagaactgctatcaagaagtttaagaacgctgttgaaagtgatagtaaggaagacgtctccaagttgcatttagaagctgaacgtgctttggataaggctgcttcaaaaggcttaatccacaagaacaaggctgctcgtgacaagagtcgtttaaacaagttagcaaacaagtaaatcttacttattactaataataaaaagaggagatctgcagtgatctcctctttttgtatactcttagacatttaagataaataatttcaaaaaattatcttctcggtaagttccatttttatatttaaattctaagtcgattgcatcccttaataaattttctagcttgtctatcttcaaccgattacgtagggctaacttaaccctatagggatgaacgcctaattcttttacaatttgtggttcgctacgacctctttgtgctaagatcttaacgaccaaaatcaattctaattgattttcaaagaccgctaataattgaattggattagtcccttcacgtaattgattatctaagcgctcaactgcttcacggtaattcttatctaaagccgactccaaaatagcgaaaatattttgtgctagggacaaatctacattttgcattactgatttttcagtaattttgttatcggtagctaccatttttagcttttgataattgcttaaaatagtgtcaattacctgatcactccgctcaattagcagctgtaaagctgactgtgtgattatatatccctcatctttgatcaaggctttagtcgttgaagcaacttcatagggcctaatttgtggctcaaccacattgaattgctttagaacagttttagtcagttttttacgcctatcaattttttcataagaagcaacaattactactacatcttctaaatcagctaagttttcaaaaatcttttgtaagtcatcaatttgtttctgtaattttttagataccttagctgttaaaaagaaaggatttttgactacaataaatttctgttcactaaataaactggattcagttaagctcgcaatcaattcatctaagccatcgctttcgcaatcgacagtcacgtgctccaaatctttaaagcgatcttccttggcatatgatctcaccaagtaatcattgagaaagtcatctgcaccccaaattaaggtatgtggattattgttatttgtatttttaaacaaagaaagtaaggtcattttttatcccgctttaaaaagtaactaaatctaggactttgcagtccgccataataccagctaatcataccacagtcttgcgttgaaacccatggtatttgctgttgagttagtgtcgttagcgtctcttgatgggggtgcccgaacctattttttcgaccagcagaaataaaaacttgcttaggatggattgcacgtaaaaagtctggattggatgatgttttactgccatgatgacccaatttaaaataatctacctgaagtttcatcctctgcataatttccttttcaccatcttgacctaaatctcctgtaaacaaccaattcttattcgctactctaaaaagcaaactcagggaatcttcattctttccttctcctgcttgatatggataaaccacattaaatgtaatctgcggttctttcacccgcattcctgcaagtaactccaataatttggtatcttttacacgaccatctaatctcttttgaaaagatggattcttaattagtccttcggccataaataatttcttaacattaacctgctctagtaatggtcctaaatcaccaacgtgatcggcatcttgatgcgaaacaaagactccatcaattgtattaattccctgacttttcaaaaatggaatagtaattcgatcaatctgaggtgtctgctttttgccactaaagtttagtttcccaccagtatcaattaaatataccttgcgaggaaatggcgtagtcactagaatactatctccttggcccacatcaatgaaggttacttgccctcgcaaaggaaaatgaatcatgctgaagaaaattacatacaagctcaacaagcccaccataattttcttactattaaagcgccagttaactttttctcttaaagaaacaattaaaataatcgttactattaatagcaacagacactgccaccaattaatttgcccaaaagttagtagtcccaacttagtagcagataattgcccaatgattttctcacctaattcaagcactttttctaataccggagcaaaatctttagtcagaccaaacgtcacaatattgaaaaaagcaattggtaaaactatccaattgaaatatggcactactaacatattaaaaattacagttaaaaaattgacctgataaaagaaaagcaatagtaatggcgttaataaaatatttaacaaaattgcttgtttaaaactgccaaacttatcagttaactgtaaacccaatgccaaaatatagctcaataaggctccagttgccagaaataaacgcggtactactaaaagatgtaaaatgcaggtcaatcccagcagatctatcgacgcaacatgatatttcttaaacttacaaattttgcctaaaaagtaggttaaactagctcttacaaagccggcttgaccattgcttagaaaaatacctagcaataaaaccaatgtacagcagacaaaagtttcttcatccgtcagtttcaagttaaaacaaaatacactaattaacaagacatagattccaacatgtaagcctgaaatgcttaacaagtgaataacacccaaatctcgataattatttagtatttcttgattttcttgagcattattttcacccaagattaattcactagcgaaaaagcctaataactgtggcatcttggcaaaatagttctgcaattcaaaacgtaattgatgcaattgatccccaaaatcagtaatcgataatagcttcatttgacaactactgtatttcaatttttggtaaatctgttttgcctgataataattctgaaaattaaactcaccaatattagttgctggctcaattgaattgcattccccattaatttctgtcactaaaatagggttcccatgcttaagcagttctttttgaacatctgttaccttgccaccaattaaaattttaccttgagcgaaattacccacacctgttaagtagtcgtctttaattcttacctgatcagggtaaattcttaattggctctgctgggttaaaacaaaattggtttttggtttacttaaaaaaatcagtaatagaaatgctccaactattagactaactatttttaaactaactcgatatttttgtactaacagtagcaaaaagtaacccagaaaaaataaagctactattttttgcaccattgttgtacaagaaaaagccaaaaaagagattgtaattagcaacaaagcggttattaagtaaaagccaacttcatttttaaacagccaattgatctttaaggctcgcaaaagttttttctcctattcctgatacctgcattaaatcttctatctttttaaaagaaccattttgttcacgataagcaataatctgttctgcctttttttgaccaattccagttaacttttgtagttccgttacattagcagtatttaagttgatcttagtgccatccccttgattacttgggctactgctactagtactcccactattttgactattatcagctgatcctgcagttgccacattttcaaccttttcacccttgtaaggaatatgaattttatcttgatccttaagcaaagtagcgcggttaatagcttttaattgtgctctagcagtagtacctccagccgcctcaattaactcctgcagacgagcaccatttttcaatgtatatactccctgatgcttcaccgcaccggaaatatcacaagttacagtcttagaaacggttgttgaactactgctagtcactgcattagtattagtggttgcacctgaactactagtgctagactgcataacttgatcctgcactgcagcagcattttcttgatgatcccctttcttcaatccataaaatccaactacaagaattattgcaccaatgagatatgcttttttctcaagcacaaattcttttactttttcaaaattcataaaaatcacctctactatttattacgcaaaaaaagcccagaattttttctagacttcaaattttttgaatttttttagtagtgtgtctttagatagtttaatgcatcatcaaaagtgctcacagggacaattttcattttggtgtgaattttctttgcggttctcttagcaaccgcataattagtttcacttttcttcacactggttgaatcagtcggcgcaaagaagacctctgcaccttctctgctagcagctaccacttttttatcaacaccaccaatgattcctacttttccggtaggtgaaatcgtacctgttcccgcaatcttatgtcccttacttaagttctgcttggtaaagacctcatagctttcaagtgtaaacatcaatccggctgaggggccaccgatttcgccagcattaatttttaacttaggcttagttttcacaactacatgctcaactaattgaatcccaattcctggcttattagtaccctttactttaacaattttgccagtaaagtgtttctcttgcttaccacgcaaaactgagattgttactcgtgcaccaatcttttgtttacgcaaataatccatcatctcttcagttgagctgaaacgatgcccgtttgcgcctaaaacggtatcaccaatttggagcttatttttaaaactagaatttttctggacttccattacataaacgcctagatattttaagctatgctggttacctgcttttttagctgcataataaattgcattctgctgacttgtttccatataccagttttgcaactcattatattgagcactagtttgacctcctagcagctccttgcttgatacacgctcatcatacggacgagtaaaactccatagatattgcaaaaccggagccggccgactagttatgctaactgtcaccaaataaaaattattcggacgtttatttgatgacttaataaactggcccacgggcattgcctcaccaggatattcaatataataatcggtcggccaaacagcaagtaccactaataaaacaagcgcaattagtgccaagagccaattacgcaagtgctttttcgattgattgtttttcttattattcatgttttagcttctctctcaatgcaatcgctgcttttttaggtaaaaacagactaacatcttcatcaaaacgagctaattccttaatcatgcttgaagctacaaaagaattttctggactcgtaaaaagcaaaactgtattcacatctggagccaattttttattaatcccagcaatctcctgttcatagcggaaatcagcactgttgcgtacaccgcgcaccataactttagcatgcaattcatgtgctaaatttacagttacttcttccggtctttctagcacttcaatattaggtatttcccttagtgcatccctgattagatcagcacgttcttcaggcgtaaacaagtatttcttagctgtattggtcatcgcaactacatatactttatcaaaaatttcagcagcctttttagcggtctccacatgcccattagtaatcggatcaaaactccctggaaataaagcgattgtcattattagtcctttcgataaatcctcacaattgtttttcctaaatggtgttctttgatcaatgaaaaaccagtaatttcacccagttctgtatgatcatcagtttctgctaccacaattgcatgatcattaagtaggttcgactttaccatctgcaacatgtccttagcgattttttctttggcatagggcggatcaagaaaaactagatcaaacttttcatcattctcagaaaataattttaatgctgcagagctgcgcatattataaacattaaaacgctgctcttccttagttaaagcaacatttttcttaataattgtacaagcagcatgattaatatcaaccagactcgcatggtcacagccccttgaaacagcttcaattcctaaggcaccactaccagcatataagtctaaaacattaccaccctgaaaaaattgtcccaatgaattaaaaagggattctttcaccttatcactggttggtcttgtccgattacttttcaaagtaaataaatttcttttagcatatttccctgaaataattctcattttagttgattctcacttttttcttgttcaagttgcaatttcttttctgctttttgggccatcttagctaattgattttcaatatgttggctatccaaatttacttcttcttcagctgaaatttcgacatgattaacaaaatccaaatgagcaatttgtcctttgatttcattgcattcgttgcgattaacataaagaacacaatatttcatttttttagaaaaataaacaatgtcaccaaaatggcgcaacttatattgatcactaactgattttaaataaataatcaatgctacccttttaattaagtgggtactttcaatttctttattgatactcatgcaactgtttcatccttttcctgtaacattttttcatttgctgaaacgttcagtactaaaccaatcgcagcagtcaagacaatcattgatgaaccaccatatgaaataaatggcagcgtaacccccgtaatcggcaacaatcctagtactgcaccgatattaaagaatgcttctgtaaaaataatagtcgtcacgccaaagcaaattaatgcgtcgaattgagaaaccgcgtgaaccccaacttccataatctgccacatcaaataaaagagtaatccaaccaataaaattgtcagaatcacacctacttcttctgctgtaatggataaaataaagtcggtatacggctctggtaagtaacctcgcttttgcatactattacctagtcctacgccaaataatcccccattgtggattgcataataggagttaactagctgggccccacctttttgctctaattcaaagggatgcaagaacgacattagtcgttggaattgataacttctttgtaaaaatccaggattccaggcaactacaataaaaaatacagctgtcactaagatcacaatcccagctaaccaagttaaagctaatttagttggaacccctgatactgaaaacattactaaagtgatcataaataaaattgctgtcccaccaaaatcaggttcaacaataaccaaacacattaaaaaagccgccaaaattgctgggtgtgacaaattatgtttgatcttacccttgactaattttccatctcttctgtctagtacatatgacaaataaatgaccagagccaatttagtaacttctagtggctgcaaattgataaagcccaagttaatccaacctacagcaccattaactgccgcactactgccatgagcaaaacgtagaaatactagccatcctaacataagtatacaaattaataaaaatccccctacaaactttggatttttaaatactttgattcttaatgcaaaaaacggaatcccaaacaaaaagaaagctactatagcatagattgcttgccgtatcccatagacatttggcttaaatccattaactaataaaatatctgaactagctgaatataccaaaattatcccaaccactactaaaataagatagggaataaaaatctggtaattaagataacgtaattttcgacgcacaagcgttgcccctttatctaaataatacttttttcattataaaacaaaaagatcatcacttctatcaagtgacgaccttttaaaatttattaaactatcttagttagcacggttacgcttcttatcagccttttgacgttctgaagtgttcaaaatcttcttacgtaaacgaatagattcgggagttacttcacaatattcatcatcatttaagaattcgatagcttcttcaagagtcaacgttctaggagtcttaatagcagcagcgtggtccttaccggcagcacgagtgttagttaagttcttacccttagttacgttaacagcaatatcacgttcacgtgatgattgtccaacaatcataccttcgtaaacttcaacaccagcaccgatgaataactcaccacgttgttctactgattgaagtgagtaagtagttgattgaccttggttaatggataccaatgcaccattacgacgacctgggttccagttctttactactggcttatatgcttcaaaggtgtggttcatgataccatatccaccagtttgtgacatgaattcattattgtaaccaatcaaaccacgtgatggaactaaaaattcaagacgagtttgaccattaccagttgattccatattcttcatctcaccttttctttgtgaaagtgagtcaataacagaaccaacatattcatctggagtatcgatttgtactgattcaaatggttcgcacatagtaccatcaatttcacggtaaataaccttaggacgtgaaagttgtaattcgaagccttcacgacgaagttcttcaaccaaaattgaaaggtgaagttcaccacgacctgaaacagtccaagcgttcaattgatcagttggttcaaccttcaaagaaacatcggtacgagtttgacgaatcaaacgatcttcaagcttcttaggagttacttgatcaccttcacgacctgcaaatggtgaatcgttggcaacaaagtccatttgaagagttggtggatcaatcttaagaagtggcaatgcttctggatgttcagctgatgcaatagtttcacccacgtagatatcattaataccactaatggcaataatatctccagccttagcttccttaatttcgttacgtttcaagccaaagtaaccaaataacttagtaacacggaagttttgagttgaaccatcacgcttcataacagtgatgttgtcactaactttaaccttaccacggtaaattctaccaacaccgatacgaccaacatagtcatcccaatcaagcatggtgatttggaattgtaatggctcatcagagttgtctactggagcaggaatattcttaataatggtatcaaagattggatccatagtttccttttgagtacttggatctggatcatatgatgaagtaccattcaaagctgatgcataaacaactgggaagtcaagctgttcatcgttggcacctaattcgatgaaaagttcaagtacatcatccaaaaccttcttaggacgagcgcctggacggtcaatcttgtttaaaacaacgataggttttacgccagcttccaaagctttctttaaaacgaaacgagtctgtggcattggaccttcataggcatcaaccaaaagcaatgcaccgtcaaccatgtgcataacacgttctacttccccaccaaagtcagcgtgacctggtgtatccaagatgttgatagtagtatccttatacttaacagcagtgttcttagacaaaatagtaataccgcgttcacgttcaatggcatttgagtccatagcacgatcttccagattcatgtgttctggcaaagtatcagattgcttcaataattggttaaccaaggtagtcttaccgtggtcaacgtgggcaatgatcgcaatgtttcttagatcgtctcttcttttttctgacaaaagtattcctccccactcttcaataaaaaaactgtgactctgtcacagtttcggtaacgcattagcgccttatcgaagtgcttttcttaaatctgtatagttacgttagtgaattttaccacctaactgcatacgggtcaacgcttaacaatcaagttaaccctggatttttttatgcaaaaacaagcaaaaactattaaactatggtaaaaatataatgtagataataatttttaaaaaggagtaattattttgatcttaatgaaagatatcgtacgtgacggtgatcccgtcttacgtcaagttgccaagcctttaacatttccatttagtgatcactataaaaaattagctgatgatatgatgcaatacttaattgattcacaagatcctaagattgctgaaaagcaccaattaagagcaggcgttggcctagccgcacctcaagtaggtgaaggtgtacaaatggctgcacttttagttcctgatgatcaaggcaaaattatctttaaagaagtttatgttaacccagagattgtctctgaatctgttcgtcaagcttgtcttagcgaaggtgaaggttgccttagtgttgatgaagttattaatggttacgttccccgccctgataaattaaccattcattactacaccgttgacggtgaagaaaaaaccattcgcttaaaggattacccagcaattgtttcttctcatgaaattgatcacttaaatggtcacttgttctatgaccgcattaataagcaggatccattcgcacttaaagaagatacagtcgtaatttcttaattgttatttaaccaaaacaaaagcctgcagatgcaggcttttttgtataaaaaaagtcactggttaactaggccagtgactcatacattgggaattaagaagattgaagagacttcttataacgagcaaatgaatttattaatcatttactacatgattatcgtacaactgatgttattttacgtcaataacattgaccaaatttaatcggtaaaaatcaaaagaaacataattatatacttaactttataattatgataaaatttttatagctattgagtaatttttactctacattgaacgtttatacattaataaggagaatcatttatgatttacaaagttttgtatcaaaaagacaagattgtcaatcctcgtagagaaactacacaaactctttatatggaagcagacaacatggtcgaagcaagaagtatggttgaggacagtaccccctataacattgaactcatccaagaattaactggtaattcgttaacttacgaaaaagaacatgctgactttaagttaacaacgttcgacaagaagtaataaagagtgcgaattaaaaataatgaagtagccgtttatgcaatcggggggttgcatgaaatcggcaaaaatatgtattgtgttcagtatcaggatgaaattatcatcatggactgtggtattaaattccccgaagataacctattaggtattaattacgttatttcagactattcttacctaatcaagaatcgtaagaaaatcaaagctcttgtggttagtcacggacatgaagaccatatcggtggtattccatttttgttagaaaaaattcctgaaattcctgtctatgcgacaccatttgccctttcattaattagaggcaaattggaagaacacggaattttaaagacaactgaactacacgaagagcatgaggatactgttttgaagtttaagaaactttccgtttctttctttagaactactcactctattcctgatactttaggtattgccgttcatacaccactcggtgccgttgtctttactggtgactttaagtttgacttaacaccagtaatggatcaacctgcaccagattttcaaaagatggctcaattaggcaatgaaggtgtacttgctcttctctcagattcaactaatgctgaagtaacacaatttactaagtctgaacgatttgtagctaagtcactacataatatcatcactggaatccacggtagaattatttttgccacttttgcatctaatctttatcgtgtatcaactgctattcaagctgcaattgataccggtagaaaggttgcaatttttggacgtagtatggaaaatggcgttgataatggggtcgacttgggctacttaaatttgcctaaggatctaattgttgacgcagatgagatcaacaaactaccacctgaaaaagtaatgattttatgtactggttctcaaggtgaaccattagccgctttatcgcgaattgctaatggtactcaccgtcaaatcagcttacaacctggtgatacagtcatcttctcctctaacccaattccaggtaacacattaagtgttaaccacttaattaataagttaatggaaggcggagccgatgttattcacggaagagtaaataacgttcatacttccggacacggcggccaagaagagttaaagatgatggttcgcttagttaagcctaagtacatgattcctgttcatggtgagtacagaatgcaggttattcacacccagcttgctcaacaagccggtgtacccgctgaaaacacttttgttttatctaatggtgaagttgtctgctttggccctgatggcgctagaatcacaggacatattcctgcaggtgacgtttacgttgatacttctggtactgcagatgttggcaacgttgttgttcatgatcgtcaaattctttctgaagaaggtttagttgttgcagttgctacagttgattataagcacaagcgagtcttagctggtcctgatattctcagtcgcggatttgtctacatgcgtgaatcaactgagttaattagtcaagcgcaaaagcatgtttatcatgtgcttagaaatgaaatggctaaatcaaatagaccaaaagaaagtgacattaaaaaggcgatcaccgaaaatctttcagacttcttgtattccaagactgaacgacggcctatgattttaccaatcattatcgaaaagaaatagtaaaaaagactccttagggagtcttttattttagaaaatgaataatatgcataaaaaaattaaagttcagttattagttaatgaggtcgctgggaatggcaatgctattaaagctgataaagaattacaagatatactaaaagaaatgaatacgcgtggtgctagttaaatcgttctagacaataagccaaattataagctaaaattgcaatttccaaccggctttgaaagcctatcagactacgtgctcgattgttctcggcattgtaataggtcagaagcgaaaagtcgctttcaattgttctgcgaatagccatcaattgatgatcattgtgctttttagctcctgtcatatttttacgatatggtgtccaaagttcgtaacccatttgttttagctgttgatgcagttctttgcctaaatagccttcgtcgccaagaagatagtaattagatggatgggtattttctatcagttcaactgtctccctggcatcatgaactgatgcctttgttacgacataatcaagaatgtaaccgtcatcgctaacaatggcatgaactttgaaaccatagaagtaaattttcttggtggccttataaccaatgttggcataaccgcgaaaaattttagcacgatagtttcgaattggttggcaaacaggtaccggaaagctgtcaatgatcaagaactgtccattcaggtcaacctttttattcatttcttgccgtatctgataaatcaattgcaatagctgacgtgaacgccgattaaaacgtgagtgtgataaacaattgaaacattcacagaatcttctttgtgattcaattcctgtcttagcttgccagataagtaaagccaaaatcagactgtccgtagttttaatttgatcaatatttcgccgatgagtaaactcagccggtgcatacaaacgataccagtgccgacaaattatcactaaatctttaaaactaacttgtaaatggtggctaaaacgcttaagcttaaggcagttcaatcagatcagactcttttctattattactatttacaagtcgagtctaacaagattggacttttttattaactaaaacgatttaactagcaccacgcgtaaatgaatattccttttaagcgacaaaaaagtcattatcctggagaattagtcgttctagcacaaaattacgctaatttacatctctcttctgaacatgttttaatcgtagttggtggagatggctcctttaatgaagttttaaatggaataaagacttctaattatcctgagacagctattacttatttgcctgcaggaacaggcaacgattttgcccgtggtgctggattaaccgcagatcccaggcaattaatcaacaatttgctccgagatcctgaaccggaacaagttgattgtggttttttcacatcaaatattaaacaaattcctaagggttactttgttaataatttcggtattggttttgatgcctttgttgttcatcagagtaatcatgagcaattaaaaaaacacctcaatcacctcaattctggaaatatgatttatggcctaaatataatcaaggcactaattaagcaggatacctttacagtgactgttaaaactaaaaacgaaactcttcgttacggagatgcatactttgtcactactactaaccatccctactttggcggtggttttgctattttgccaaaagcggacatttacagtcaccatcttgatacagtaattgttgaaaaaccgagtttacgcaagtttctctggctttttggtaagctgatcaaagatggttcacacgttaatgcaccagaatttcattatattgaagctaaagaaatcctagttcaaaccaataaaagtgaatatgctcaaattgatggtgaagatattgaaaagcagcccttcaaagtaacatttaaagttgatcattttaatttattaaaataaggaagaattccaaattcttccttttttatatcttatctaaaatatctcttttcgaattatgattttgataatattggtcctgatcaacgaaatcatgtacttgatcataaaatttcttccaataacggtatttttgatactgcttttgccactcccgtgcttcctgcaagtaattaccaagaagtccattaatctgatcgatatgtttaatcacctgattagcatgatacaattgctcttccacctgcttttgagttaacgttgactcctgatcttcaaaaaatagaacattttcttgataatttttttcttcttgcaattgtttactattgtccatttcttctttgatagctgcaatttcgtctggctgtaatccaattccagttttagctttgactaataacgactgaatatctgccaattgcacaacatctatttccattttttgataacggttcgaatcagtcaatgtgaactcatcatctgttctacttacaaatacaaccacgtttctgattaattgatctatatttggcaagcgtctcaataaattaataatcactgggttgttgcttttttctaggacatatttaatactttctttatgcttggccacttgatcggctatctgatcataatcagcctgcacattatactgtccatttttacttgttcgtgctttggtttccaagcaaaaaatcccgctagtcgtaattatcacatgatcaatttggttactccctaaactattctttttttcatagggatatggtaacagtaaattatgaattatttctttccctgtctgcacttcacgtaaacgagaattcactaattcttctgcggcagcgcctgccaagagattgctaagatggcgcaaatcacgttgagataaaatattcataggtcgcaaatgttttatttgattcaaatgtagttcagtcattcttttctgaaatgcgtttactttttgattgtaaaccttatagccagaattaattgcccgaattcgtaaaacattttgcagagccaaagctcgtttcaaatcacgtttattattcaacaaagttttttcaactatcatagcatcatgaacagtttgtgaatcagttacttttttatgtgtaatccaagctttttgataactagcatgattttctaactcattcacatactgatttaagtcattttccaaaggcaaaattttgtttctaccttctttgactattgagccataatagcgcaaattttttgtaatttcgtctaactcattgaattcatgtttgccataatggtaagttaccttagtttctccattccaactagtcttacgccaataatgaccatccgtctcaccaaattcaactaattccgccactgaacgatctaaatagtacttaatcaaataatgacaatggcctttattgtcaaaaatgcgtcgcttaatataacccggtcgcattaattcaatgatctgaaaggtcaagttcttatgattaggaaaacggtatggtaatcttttgcctgcaattttttcaattttagttatttctttcttatctgttacagataattctatttttttcattttcttcttttttcgcttttgaaaaaaataataggttaataagcctattgttagtgtaattattgtaatatccatgttaattatccatattttggaacgtatgtttagacaacaataattataccatgattttgtataatgaaaaagccccttgttttaacaattcaaggggcttttatccttataatttgatattttccattccaatcattggatcaatttcaccagaatatattttttccgaggttagaacaaaatcttctgctacttctgctttatcggtttcattctccatttcttgagctttttcgtgctgcttgctttgatcagatttatccaatgattttgtaatacccaattgctgacaaatcttcgctgctaagccagtcttacgatcatttcccggcgtcttaaaagctgccacaaatgcccgtggatcaccaactaatactaagtttttctcagctcgcgttattgcagtatacaaaaggtttcgttttagcatcacaaaattctgcatggttagattcaagatcaccaatggaaattctgaaccttgtgatttatgaatagtgattgcataagcccgggtcagatcatttaaatcttttctagaaaaggcaacttctcttccatcaaaatctgcaatcatgcattccttggcatcatcttcatcaatgctaatgatcttaccaatttgtccattataaatatctttttcaggattattttgcaattgcagaatacgatcgccaattcggaaaacttcattatgtgcttctaataccttacttttaggctgagatgggtttaaaattgcctgaataacattattaagattagttacaccaccattgccaagatacatcgcgctaagcacttgaatatcatcttttgcaaatccacgttttaaagcaagtttaacaatttgtccaactgcatcccctactaattcgggacgacagctaataaaagaataattatttgttttcttaaacaatgcttgctgatctttaccctcattaacatcatgcgccaaagtaataatcgttgaatcatcaccctgtctatgaatctgcttcaaaatagtagttggaaacgcttgcgatttaatcaggtcactgaagacattgccagctccaaccgaaggtaactgatccttatcaccaacgaaaacaatatgccgcgtatcatgaatacttgccaaaagttgtttaaaaaggaacatgtcaaccatcgacatttcatcaacaattaagatttcaccatttaactcattcaagtcctgagtgttagtatcaccaatacctaaccccaacattcggtgaattgttttagcactgattccggtaatttcacccattcttttagctgcacgtccagtcggtgctgctagtaaaaacggaggatcttcactgtaaagagcggaggaaggaatctcagccagcttgcgtaatactaataaaattccattaatgatagtagttttacctgtacctggtccacctgtcaaaatagaaatcggttggttaactgcgtttttgatggccaacttctgtgtatcgtcgtagtgaatcttaagttccttttcagcatccttgattgcttgctctacctttttatcatcatattgttctctttttttatcttcttttttttctaccaagtttttcatcaagcgagcaatatcaacttctgtttgataaatattttgtagagcagcattctcaccatcaactattactttgccagcttcttgtaaactattaatacagctagcaattgggtcgaattgattgatttgaagcaatttacttgcttctgttaataactcagctaagcctacataagtatctccctcaccatttaaagcatcgagtaatacttgataaacagcacctttaattctacgtggatcatcactagcaatatctaattggcttcccatcatatccgcggttttaaatgcaaaacccgaaatatcattaactgctgcataaggatctttctctagttttgctaatgcttcaccatgataaagctggtaaacccgtcctgcaatacgcttattaatgccgtatttagccaattttaaaattacttctgaataagaatccatcgcatttagtcctgccaaaagactatccttttgctttctagttaaagaaagcttatcaatcttagctggactttccttcaatacatctaaggcatttagccctaattcatcaataatcgtagtcgcagcctttttaccaattccagggaacttattcgaactcaaatacttagttaaagatccctcttcatgtggcaatacttgcttatagttatttgctctaaactgcaagccaaatttttcatgcattactagtttaccctcgaagcgatagctactattaatttgaatatcgccaaaattccctgtcaccttaatatcgggacgagaataatcggataaagtgccgataatttcaacgtcaagaattttatacaagtctttactattttcaaaaacaatcccgttaaccttaccggtaaattcattcataatttttcttttccttgtcatttagcatcttcataattgaagcatactgattcattgcttgttgataatacttagcatccatctgcttagcttgagcaaaatatttttgagcctggtcacgatctttttctaatgtagtgacacctagtaaaaaataaactttcgcatttttcttattatcaggaattgccaaatacatttgctgagcctgttgattctcacccaaacttaaccaaatatcgcctagcaattcctgaattcgctcatcaatttttttgatcgtcaaagcataagctaaagctttttggccttgccctaattttaagtaagttagtgccttttgataaagagttaagtcatcattaggtatctgatctaataaagccagtgctttatcaaaatcgccttgcatgtaataacacactgccagattataatttaattcttgtggctctttaaccagatgctgggcctgctccaatagcttctgtgcttgatccaagcttccttgctcaattaaatacgtcgatagctgcaaataattagcaacttgttgtggatgctgatcgatttttttgattaaaagatgaatggcttgttctactttaccttcatcataaagttgcgctattttttgatccattataacgagtccgtcttcgataatttacgtcctaaataactagtttcattccacactaccggtttaaaagtctttccgccatctagtgtttctaagacagttaaagaggtattgctaaggccgccatttttgcgaatatctttcaatggatagcctaaaagtccacccataatagctgataatgccgcaccatgactaactgctagaatcttatcatcatcgtcaggaaatctttgtgccatttcttgagcaaatgcttttccacgagcaataacatgtggataatcctcaccatgaagttcagtcggatcatatttatctggatggtgccaaaaattatccatttgtttagggaattttttctctgcatccccaaacttcattccctccatatcgcccaaattaaactctctgagtcgttcatcgatcacaacaggtaagttagcgttcattgcatcatcgatgccctgagcggtattaaaggcccgatcaagcggactggcaaaaattcctctaaatttagttccttgcaagtgatgacctaatttttttatatcttctaagctttgtggcaaaagtggtgaatctccatgtcctccttggaagcgactagctaaattccactcagttttgccatgacgaacaaaataaatttgcattgcttaaatccccctaattgtctaatcaataagaatagtttagcacaaagaaaaaggcgttcgaaaaatcgaacgctctttttgcatattttttaaactaattgtaattgcttttcttcttggtaagcagcatcaatattaccgccacctaaacattcttcacccttgtataaaacaagtgcttgacctggtgtaactgcacgagctggctcatcaaagtaaacatcagcagtattgtctgcggcatgatacttaacagtcacgccgatatcacattgacgataacggaactttgcagtacagtgcatctcaaaatcatgatctggcttaccagtaaagaatgacatatcacttgcattcaagcgactagcatatagaagtggactatcatagccctgctctacaattaattcattcttcttaagatccttgccgaccacgaaccatggatcagttgattccttagttgagcccaagcccaagccctgtctttgaccaatggtgtagtacattaaaccagcatgctcaccaactaccttaccatcaggagtgaccatcttacctgatttagctggtaagaattcacttaaaaactttctaaagtttctctcaccaataaagcagatacctgtagaatcttttttcttcgcggtagctaaaccattagccaaagcaatctctctaacttgtggcttagttaggttagctagagggaaaataaccttactaatctgctcttgactcaattggctcaaaaagtacgtctggtccttgttaccatccttaggacgcatcatatgagtaacaccattggtatccttaacagtcttagcatagtgccccattgcaatgtagtcagcatccaagtccatcgcaaactccaagaacgacttgaacttaatctgactattgcacattacatcaggattaggggttcttcccttcttgtattcatccaagaaatattcaaaaacgcggtgccaatactctttttcaaaattaattgaataatatggaataccaatcttatcggcaaccttttttacatcttcatagtcttcagtagctgtacagacgcctgaatcatcggtatcatcccaattcttcataaagacaccaacaacatcgtagccttgttgtttaagtaaaagtgctgaaacagacgagtcaacgccaccactcatacctacaactactctagtcttgctattgtcaaccattattcaatcaatcctttacttcaagcaaaatcttacgctcctcaagatcctttaaaatataatctaaaagttctacagtaggagctaattgcttatttttaaaaatattaaccttctgcaaaccgttgcgatcagtaataaccatagttaaatgcgacaagtccttattaatggtcatctttaacttagtaggcgcgttataaggtgaatcattgtaaagaggatgttcataattaaaattacccttagctgtcttcacaaagccagcatcaatcaaagcataaagcttcaactcaagattcaaagtaaacttacgtttatcaccattaatcacaactgtatttgccataattttcctcacttatttataataagatactttctttttgaaagcaactatttatttttagattgaattctttgtacaatttttactaattcttgagcgaattgctcaatttcttcatccgtattataacgcccaaatgaaattcggatcgactcatttattcttggtgaattttctccaaaacaagcaattaaaacatgtgatggctccaaagaaccagcagtacatgctgaaccgcctgacacggcaaatccattcaaatcaagatttgtttgtaaagaagtagtagatacaccattgagatgcagattaagcacatgatgtgagtaacccggaccatacccaccattaatttcataattaatttgatgatcgtctaattcctttaaaataatgtcttgataatgagcatatttcttttgcaaagcatcacgaccaatctcggatacttcacggacagcttcgccaaagccggcaattcctggtacgttctctgttccagctcgacgtttggtttcctgctcaccgcctaaaatcaaatttggaatatcgatatccgcattttcatataaaaagcctaaaaacttaggtccattaattttatgtgcagaaacagacagaaaatcaatgttcatgtccttaacatcaattttaattgtgcccattccctgaacattgtcaacatgaaaatatgcattggagtcctttaccattgccccgatttctttgagcggcataatggtaccaacttcattgttaacggccataatcgatactaaaatagtgtctggcgttaattccttttttaactgttctaaagaaatttgcccgttttcatcgacattcaaatagacaatgttgtagccctcattttccaaacgtttcattggattaagaaccgagggatgttcgatcggcgtagtaataatctttttaccaatatttttacgagcataggcagttccaagaatcgctgtattattgctttctgaaccacctgaagtaaaaataatctctccatcttgagcattaatatcttgagcaatctggtgacgagctcgatcaattacatttctggccctacgacctaattcataggtactagaggcattaccaaaatcatttttcatttcatcggtaataatatcaattaccttgggtgacattggtgtcgttgccgcattatctaaataaatttcacgcacgtttaattcatcttttctacataatcactaattaacttagctgccttagcgccgacttccttgacaaacttgtcaaaatcattgtctgcattagcatccccattatcggaaattgcacgcatagcaaccaacggagttttaaaatgacgagcaacttgtgcaaaagcggctccttccatttctactcctaaagcttctggaaagtttttcttgattaactctttttgttcttctgattgaacaaaagtatctccagtaacaacaagcccttccttaaaatctacgtcttcttcacctaaatatttcttaaatgcttccctttcaggcgaattcaacttaaaggtagcaggctctcttggaatctgaccttctacatattcaccggcactaacacagtgagcatcgtgataggcaaaatcatttactaaaatcacatctttacgatgaacatcatcttgtaatgatccagcagaaccagtcataaaaattacatcaattttttctttagttagtaaactagtcagattcatagcggcattcactttaccgataccacttaaacctaaatatacatcattgccattaacagaaaaatgttcgaattctgttgatccgaacatttcttttgtttctgcatggaaatgatcacgataaaattcagcttcttccgccattgggacgataatcgcaatcttcaatttatttcctcatttccactataaatgaaatagtgctaatagcaccaatataattaaaacaatcactatcaggatagcacgattcaatctttttttcagtcttaaagacttctcttggcgaatcgtttccttatcactcgattgattatgctgataaaattcttgtccatccccagccagagggcgtcttctaggttcttcttcagagtcatcccgcttaaagtcaggatttacatctacttcttctgaatcattatcagaaaaggaagattttagcttattaagtaggctttttttctgccttttacgataatcagagcgtttttctaccataactaatccttattatcggtctgagcattacgcaacatcatattctcccaaacagtaattgcataaattgtctttgcatcaacaatttttccttcagccaataaagtttttaattcatctaagctataccaactagaagttaaaaattcatctgcatccagtgcccgcttatcagtcaatttagttaaggtatcacaatagaaaagatacatcttttcatcacaaaaaccaggagaagaatagaattcactgaccttttcccagtaatctgtgcgatagccaccttcttcattcagctcacgcttcattgcatcaagcggacttgcatcagtggaatcaaccaaaccagctggaatttccaaagtaatctgcttaattggttcccgccattgctttactaacaacatcttttgttcatcattaattgcaataacagccgatgcaggcttatgcttaataacttctctagttgcagtttcaccattaggaagcttaattgtacgaacagccagatccaaaatacgtccttgaaaaatctgctgtgacgagatttctgtttcctttaaatccaaaatcccagctcctttttaggctaaataaacatttacacattgcagaccatttttaccttgagctaactgatatttaactctttgacctacttgcaaagttttatagccttcctctttaattgctttatagaagacaaaatatgacttatgattacgatcatcttcaataaagccatagctactgccttcatcaaattgttttacagtacctaaccgcattagttttcaaatccttcttgaacagcttctgggtaatctgcttcaacgattttagcacaacgaccacaaagcattggcaactttggatctacgccaatatcagttctaatcatccgacaacgaggacatacttcgccttcagcatgttcaactactacactagcattattcaattgctttgcattatcaggtgcttcaccatcagcaatagttaacttagatacaattagaatttgtctgaaatcagcatccaagtcttggagcattgccttagtttccttatctgggtaaatagttactgttgcttcaaacgatttaccaattaacttcttatttcttgcatcttctagagccttcaagacgtcatcacgcaacttcatgaatttaccccaattttcaagcaaatcatcatggttagcatattcttcaacttctggcatattagcaagttgaacgtaatcttcaggttctttcaagaagccccagatttcttccatagtgtgtggcaaaattggtgttaagatcttagccaatttaacagcagcgtcgtaaataacagtttgcattgagcgacgatcatggctgttttcaccatcaatgtaaagtacatccttagcaaaatcaagataaaatgcagaaagatcattagaaacaaagttgaagaccttcttgaagacagtagtaaaatcaaacttgtcgtaagcagcaagacagtctttaactaagtcatttaatttcacttccatgtattgatcaactgaacgaagatcagcataagcaacgcgattttcttttggatcaaaatcactagtgttggccaacatgtaacggaaggtatttctgatcttacggtaactttctgcagactgctgcaaaattcccattgagactgcaacatcagaagtagtatcagcttgagctacccaaagacgaataatttcagcacccatcttcttaattacatcgtttggtgaaattacattgccaagtgacttagacatcttgtgtcccttatcatcaagcacaaagccttgtgataatacttctttataaggtgccttaccagttactgcaacagacgtaatcaaactcgaattgaaccaaccacggtattggtcactaccttcaagataaagatcagctggatagtgtaaaccatcacgtttttccattacgcctgaccaagatgaaccagagtcgaaccaaacatcaagaatatctttttctttagtaaactcgccatttggtgaatgttctgaagtaaagccttctggcaacagttccttagctgtatgagtgtaccaagcatttgaaccttctttttcaaagatcttggcaatatggtcaatcgtttctggagtaacaattggggtaccgtcttctgcatagaagatcggcaatggtacaccccaagcacgctgacgagaaattacccagtcgccacgatctttaatcatgttgtaaagacgagtcttcccccatgaaggaataaagttagcttgttcaatttgatccagaatttgatctctaaacttagaaattgaagcaaaccattgagtagttgctctgaagacaacgggcttcttagtacgccaatcatgtgggtatgagtgagtaaagaagcttaacttgagcaaagcgccagcctttttaagcttatctgctaccaccttgttagcatcatcatagaacattcctacaagatctggatctggaatatctttagtaaagcgaccttgtgcgtccattggactgaagaccgggataccatacttttgaccaacacggtagtcatcttcaccaaaaccagtagcgttgtgaactaagccggtaccgtcatcatcagtaacataggtgtcattcattaccaaaccatattggcctacaccagtcttaccataaaggggatgcttataagtcatcccatcaaaatcagtaccttttaattgtttaagtactttgtagtccttccagcctaagtcttctgcaatggctggcaaacgatctgaaccaattacatacttcttaccgtcaacttctactaaggagtagtcaaatcttggattaacggtaatacccacgttacttggaatagtccaaggagtagtagtccaaattactaatgaaacatctgaatctaagatacctttaccatctttaattggaaaagcaacataaattctaggtgatttaatatcatggtattctacttcagcttcagctaaagtggattcacttgaccatgaccagtaaactggcttcaagcccttataaatataaccttttttatacatttctccaaagacgcgaatttcttgtgcttcaaagtcatgttgcaaggtaatatatggattatcccaatctgccataacgcctagacgcttaaagtcggccatttgcttttgaacttgttcttcagcatattgtcgacaaagctcgcgatacttagcacgatccattgtcttacggtcaacgccttgcttagctaattgttgttcaactggaagaccatgagtatcccaacctggtacatatggtgcataataaccgttcatattcttgtagcgaacaatgatgtctttagaaatcttgttcaacgcatgtcccatatgaatattaccattagcaaatggagggccatcatgtaaatcaaaacgaggcttaccttcgtttaactttaatctttgttcatataacttgttatcttcccattctttttgccattcagcttcacgaacaggtagattaccgcgcatcttaaatttagttttacctaaattaagggtatctttgattctcattaacaaaattcctttctaaaaaagaaagcctcatcctaaaattaggacgaggctaaccgtggtaccacctaaattgaacttattataagttccacttaactttgcgtaacgtgcaaataccgtttagattaattaggcagctgatcagctcttaggctcttatgctagtcttccaccatcactagctcgctgaattgccttcaagctttactgtcaatctaatatgcttattttttatagtcgtcaggaaaaacaattgttgggcctaaaggatctgatttcatttcaggcttaacattaattgtttcatgacttggactgtccccggtcattggtttaggtgcagcattttcttcattatctgcatcgtcagaatcatccggttgatccaactccaaatcatcagggccttgagaagagtttacgtcattttcatcatcattgtcaacatcttcatcttcaacgtcttcatcatcagcacttactggctccgaaccatcatctggataataacgctctaagttgaagtaatcatccaatgcatgttgccacttttcatcattcaaattatcgatttcagtctgtagcatttcttgaatattactacgaaattcactaacttgctcttttacacgcatataatccgtagaaatagtatcttgttgatgcttttggaagttaatattatcttccgcttgctttttggcatccgcaataatctgcttagcctctgcttctgctttctctctaatttcatcagcagtttgttgtgccgaaattaatgatttatttaaagaacgctttttttcgttatattcattaacttgatcttgataatcatctactttttcttgtaaatcagttaactttttatttaaagaaactacttcattcttcaagtcaaccacttgatcaagtgtatcaccataatcatcaacaatctgatctaagaagctatctacttcaagacgatcatatccattacgaccacgccgtttaaattccttgttgtgaatatccatcggggtcaattgtgtttctttgtctgccaaagtctgagcaccaccttatatttaccttttcttgtagtcgaaacatcctcaatcaaaatccgaccaaagtgtcttaaactcaagacatcgtcttctttaatcattatattagaatctgctatttcatgccaatttaatttaaccagctgactattaatcatcttttgaatttgaccgcggctttgtctgctaatacccgataatacagcatcaattcgcattgaggcaactattttcgttttttcaatcgaatcatcctcaggaaccaaaacttctttgaagctaatcggtctcagctttacttttgctctgccaatgcggtcaatttgctcttcaaaaaattccgtcatttcttttttagtgaaaaactgccattttccttgattatcattaataatatcgccaaaaatacttgtatcaatacccgaattcgccaaggtgcctaaaataacactatgatttattttagtaaatttttgcggatattcaatttcatacggctgaatctgataatcactcggtcgcagattaagccattcttcacttaaataaactcgctttttctctgcattaggatagccaccatactcttgaacaaatgcatcattaccaacaattgttcttaaaattgctcgttttcccggatccaaaaaatcagtcaaaattggctcatgcttaaaaatcagctgattaaaaagaccagtaaaatagtcaattactggtctttcctcttgattaaaatgtgggtaaaacttacttgcctgtctgcgttccattacaccatcatcctcaataaaatatcaaatatccatcttaaaacatagttttgaatgaaatataagataaataaagcaataattggcgagacatcaattccagttgaataagctaatctcgcaaatggaccttttcgaaacaaatttaaatatggatttacaaccttgtctaaaaagcgaccaacaacagaattacttagcattggtagccaactcataattgcatcaatcacgatcagcagactataaagccataaaatccacgtcagtgccaagtagattaaatttaatatattaaccattagcttaaattgtctttcttatccactaaatcactaattttgccatcagtaacaaactttggtggagttgctaaaaagattttatcaccaatacgttggatttcaccatttaatgcatatacagtacccgtgatgaaatcaacaatccgacgtgctgaactgtcttccattctgctaaaattaatcactactgctttattatttaataaattttgtgcaacatccttagcatcggaatatacccgtggttcatataaaacaatcttgcttttagccgaattcaagcctgatttaattgaaaccacattatcgcgattaactgagttcagaggcaagtcttcattttcatttttagtctgtgaggcatattcttcgtcattttctaattcatcatcattagaaattccgaaaaatcttcctaatttatcaaaagccatttatactacctccaaaactagttttcactacgatgtttaaaaaatggaatatcactgttatcatcactatcgtcctgagcgctagtttcaatttgagaaatactatcctggtcttcatcactaaaagtatcaaaaccctcataatctttcttaggctcagtaggttgggtatttcttctttgattgtcttcgctatcatttagtccccaaacactggttggatcaaccatcgtttgcttaggctgctcaggttcttgtttttcggcagcaggctgaactgtttgtggtcgatcaactggttgcttaggttcttcagccttaggagcttcttctttttctttaactggttgagccttaatttgttggctacgacctggtaattgcttagaagcagcttcttcagccttagaatcaattccagtagcgattacagttactaccacctcatcgcccaagttaggattaattgaagtaccgaaaataatgtttacatcgtcaccagcagccttagaaacaatctctgaagcatcttgagcctcaaataatgtaaggtcaggtccaccagtaatgttaagtaacacttgcttagcaccatcaatagaaacttctaataatggtgaagaaatcgccagcttagtagcttcaactgttctattttcaccgctagcacggccaattcccattaaagctgcaccttgattttccattacagtcttcacatcagcaaagtccaagtttacgtagtcagttgaagtaatcaaatcagaaataccttgaacaccttgcttcaagacattatcagcttccttgaaggcatccatcataggagtcttcttgtcaaccatttcaagcaaacgattgttagctataataaccaaagtatcaacatattgctttagctgagtaataccttctgcagcgtttttagagcgcttagggccttcaaaactgaatggacgtgtaactacgcctacagttaatgcgcccgtctcacgcgcaatttttgccactacaggagccgcaccagtaccggtaccgccacccataccagcagtaataaagatcatatctgcacccttaagtgcatcttcaatcgtttgttcactctcttctgcagctttttgtcctacttcaggatgtgaaccagcacccaacccacgggtcaacttaggccctagttgaatcttgttttcagctttgttgctgttcaaagcctgaacatcagtgtttgctgcaataaaagaaacaccttgtacgccatcgtcaatcattcggttaacagcattgccgccggcaccaccaacaccaattactttgatgacagcattcttattgtcgtctgaatcgaatgtaaaatccattaaattaaccacctttaatcaaagaatttcttaaagaaactcttcaagctattagttttttcttgcttagtattattttcatcgtctggcacagattctgttctggcagacattttgcttctattataagcttctttagcttcactttcactattagaagtcgtacttttagaaatcttggtactttttggctgagaaacggggtcttccacagcgggttcaccaaaaccatagattacgccattaacaagatagtcaacttcagacatcttatatgaatagtggacgataccataagcagctgtataaatcggattacgcataccaatttgatctggttcataaattcgggccttaacatttaacccattagcagtcagactatcaattccttgtaataggctactaccacctgtaatcacaataccacctggttgcttcaatgcattatgcttaactaaaccttttcctaaacgagtcaaaatttgttctaagcgtgcattaataatttcactaagatatacttcgtcaaccatttgctgactatttgcaccaacactattaatagcaaatttatcgttttttgaggcaaattgtggatccgcaaatccatagtccaacttaatttgttcagcatcctttttcgaaatacttaaaacagcagagatatcattagtaatatcgcttccgccttctaaatcgatgttggcatacttaatttggccatctttaataacagttgccgtacttacgccaccaccaagatcgataattaccgaaccaaaagttttttcactttcattcaatgctacacttgaaattgctaaaggcgttggcacaaagaaattattatgataaccggctctttcaatagccttcttgatattgtgcaaaggactagtaggtgcagttaataaaattccactaacacccaaggaacgtgcaatcatttttcttggatcatcaacttcagttttaccatcaatcaaaaagcgactcggcaaaaatgtaattgcttcacgatcatccttagctgctgaatgaatcgcagatctaatcgttctttttacatcatcattatttacttcttgcccttgttcaccaacattagcaaaaccagttgcagtttccagttgtaacatccctaccggaattcctgtaactacactataaatcttggcgtttgttttttctgctacaccttttaatgcacgactaattgcactagcagtttgatcaatatctactatttgaccgtgtcgcattcctgaatttggcgttgtaactgcaccgataaccttaccagaatctgcaacaacggcttttacacttgtggttcctatatctaaacccactaaaagatttgaattctccaaaattaagcccccattaatatttgccttgaaaaaattctaacataaataaacttgcaaaacagctacgatatgccataagctttcttttcactagaagttaatggtctactaaatgcacctatttctaaatcaataaggctatgtttaccagctttaattctaatagtatcataatattttagtttgctattcaaagtagcagtattgccaatcactacattaccgtccttcattactaaaataatttgtgaatttcgtctggtattcccacttaataattttacctgatttttaaatgaattaggtaaactgttaaataactttaaatcattttttaactcatctgatttattatagccaacaaaaataggtttatcttggttcacttttgtccaaggtagagctctcgtacctatttttccattatccaaaatctttcggtaagaataaccatcttttaagtaacccacggttttacgttcattaatttgtaaaatcaattgattaatatgacctaaatgaacttgtgcactttgaatttctggatatttttgggataatctttgactcaaatctttttgttgaaacaagtaatcaaaaactttatcgctagccttgatcttggataccttaacaatttctttagcaggtaaatgctctgcaccaattattttaacagtactgatattcgctaaaggtgaaatatagtatcctaaaccagctatcgccaaaactgaaaccgtcattatcagacctagcctacgtcgtaatgatcgtcgtctttctgcctgtaaatttgagagtgaggcagaaatcttggtctgcgattttcgactattcctttgttggttaaattcatgattcaagtacggagacaattctttccttggatcaatcttagttactggctttttggccatctgcctcacctacctcctagcgtgaaatttcttccatcaccttaatcacttgatcagatgcatcaggtacgcctaaagccttagaagctttgctcatttcagtagcatacttttcatcgagcaaaatatggtcaattgaagagacaaaattatttggatttaaatcatcttctggaataaccaatgctgcaccagctttttctaaatcaagcgcattcttcatttgatgattatgagttacattagggcttggaatcaaaataacgggtacacctaatgcagtaaattctgcaatacttgttgcaccagatcttgaaacaacacaagtcatttctggcaatagacctggcatgtttttaatgtatggcaaaactttaatattattaccaatatcaacattcttaattttttcttgtaccttatcaaaataaaaagtacctgttgcccaaataatttgatatggtttttgctttagcatcattaatgacttaagcataattctgttaattgctaatgctccacgggatccaccaaatactaaaacagttggcatttttggatttaatccccatgttttttcaagatcaattttttcttcgtgcaagcttaaaacttgttgtgaccgtggattacctgtcttaactagtttcttcttttctgagaattcctttgcagcatcatcaaatgtataacaaattttatccacataatgacccaaaaatttattagctaatccaaccactgaattagattcatgaatcattgttggaatatgcattttagctgcttcataaaccatagcaccgctaacgtaaccacctgtacctaaaatgacatctggtttaaagtcccgtaaaatttggcgtgcgcttttagtagcttgtaaaaatagcttgatagtctcaaagttttttaacggatgtttacggttaaagccttgaatcttaattgttttaaagttaacaccggctgctggaacaatttttgattccaatcctttttgtgtacctacaaataagatttcatcgtttttactaataccgcgttctttcaaacgttcaataattgccataattgggtaaatgtgaccgcctgtaccgccacctgtaaaaataactctcattttatttagtctttaattcctcaacaaatctaacaaagtaatcgccacgttcttcaaatgttctaaattgatcccaagaagcacatgctggtgagaacaatagtacatcgcctggttcaactaattcccaagcacgaggaacggcctcttgtagtgtattaacaattacaatgtccttaattcctgcttttctagctgcgtcagctaacaaatatctagtttcaccataaagaacaattgacttaacatgttttttaaataatggtaccaaatcatcaaaagtgaagccacggtctaacccaccagcaatcaatacttccggttgcttaaatgatggaatagctacagttgctgcttcaatattagttgacttagaatcattataaaccttgcagccatcaagtgttgttacatattgcaaacgatgcttagcgccagtaaaggtgctcaatactgcggcgatatcatcattatcagcgcccataattttagaaattgcaatagcgactaaactattttgcaaattatgaatacctggtaatttaatatcagaaatcttcataatcttttcgttttgactttcaagatattcatcgccaatgaaataatcagcattatgatctgtctcagaaaaagtttgcattttagctggtgaaacttctttttccttagccaaaatatctttttgatcataattagcaataaagtaatcattactgttttgcgttctagttacattcaactttgcattgacataattttcaaaagtcttgtgataatctaagtggacgttgttgtaaatatcaacgatcgctgcaactttaggatcaatatcagttacacccaaaagctggaaactagaaatttcaactactaaaatatcatccttagttgccttaggtacaacttcagaaatcggtacgccaatattaccaactgcataagcatgatgaccagatttttgcaaatgatggtccaaaattctttgtgtcagcattaccgtagtagtttttccatttgaaccagtcacacaaacatagggagcatcactacaacttaaggcaacttctggttcagtaataatcgggatattcaactcctcagctttttgaaccatcggattttcatagggaatacctggatttttaactaaataatcaaaatgttctttttcaagcaaatcaactggatgatgaccgccaattacgcgcacgccgcgacttttcaattcttgtgccttagcatttttctccaaatcagctttatcatttaaagttaaatttgctcctaattgcaaaaggagttcgctaacagcaaaaccacttttacccaagcctagaaccaaaatgtttttattattataagttttaatatccttcattttatgattatccccaaattactaaatacaaaatactgccaattaatccaactaaccagaagacaatatctactttccattctgaccaacccaacatttcaaagtggtgatggataggtgtcatcttaaaaatacgcttacccgtagtttggaaagaaattacttgtaaaattacactagcagtttcacaaacaaaaacaatcccaactaacaataatgaccagggacggttaagcataatactgattgttgctaaaccgccacctaaagcaagtgagccagcatcacccatgaaaattttagccggcttatggttaaaaataaagaaggcaattaaaccaccaattacactcatacaaaaggccaaaacagcaaaattcttttgtttgaatgcgatataggcatatgtaccatatgctacaactgataaacctgttgctaaaccatcaagaccatcggacaagttaacagcatttgaaaaaccaaccagccaaaaaataataaatgccacaaataaaactaagctatggacaaccccagcaaaaggaatatataacccaaattgaaaatgatcacttgtagcaatcaagacaattaaaattgcaattataatctgtaatgctaatttttgccatgcacgcaagcctaaattacgtttgaagtaaagcttaataccatcatcaaggaaaccgataataccgtagcctaagagactgattaccaaaatccaaacaactttattcaagctgtgctgcatagcagctacccaaataacagaaataactgctgcaattacaaaaacggtcccacccattgtaggtgtgccagactttttttgatgccatttaggaccttcatcacgaatttcttgtccttcgtgatgtgaccgcataaatttaatcaacaatggaataaagatcactgtcaaaaccagtgaactaactagggcaatacaacttgccaacatcatattcattctgagttactcctttaacttaatgtttaattttcttccagcttttaattctgttcctttagccacgctttgactcgcaacagtgccggtaccttttatgcttaacttaatatctgtcaaactagcaaattggtgtaaatcactataagtccatcccgtcatatcaggacaaatgatttttcctgaagtattgacaaaaatcttagacccagactctaacttttcgccactcttaactccttgattgctaatccgatcaccgctaccaattttaaccaaattaagtcctaattgcttagtttgactttcagcttgtgcaacggttttagcttttaagtttggtacttttacagtagttgatacatcatcatttttagcaatcgaaatgattctctgcatcatcggtttgaaaattgaagccaaaatcttttcagctccgcctccaattaagtgtggttgcttaattgtcaaataaatacagtaacgtggtttacttgctggataaataccaacaacagagaaaatataattactatcaccctttagataacctccacctttagggttagcaatctgcgcagtccccgtcttaacagcaatatcggcgtttcccatcttataagcagaaccagttcctgattgcttattaagtacctttctcatgttagccacaattacttttctggttttagcactatatactggagtaccaacttttttaatctgatagccttgaattgtattgccatcagagtcagtaattttattaaccaactgtggctttaccatttgaccattattagccaaagaactataagcttgcatcatttgcattacattcacagtaacgccttgaccaaaagcagtaattgcttggtcaactggtgttttaaacgaaatcatccccggctgctcacctggaagactgactcccgtcttttcaccaattctgaacttcctcaagtacttcttccaagtcttagcacccatcttttgttctaacttaacaaaaccagtgttacttgaacgttcaaaagcttgagaaaatggaattgtgccccaacctgaagtcagccagtcatggatagtcgaaccagcaatattaacagaaccagaccggtaatactcattagggttgtaattgccactgttgactactgcagcgaatgacaaaatcttgaaaactgatcctggttcataagtatcttggaccaagatatcccgatacgacttagttaatcccttcatagtttgaggattaaaagtagggcgttgagaagttgccaaaattttcccagtcttcatgtcttcaactgtagcagtaattgatgttggtcggtaagttttctgtacttcacttaagcgagtctcaagcaaactctgcaactgagaatctagtgttaaatacaagttgtttccatttttagcaggcttataaacctgattactatttggaagctgatattcagatgcatctaccgaagaaatccggtaaccatctgtcccagtcaaagtcttattgaaataggcttcaattcccatagttccgactaagttttgtgcattagtctttttattccaaattggttgagccaatccaacagtatgtgatgcaaaaacaccattgggatacaatctagatggtgtttccaagaacttaattcctggtaatttcattgcttcaatctttttcttttgccgcaatgtcagtccactaccacctgtcccaaattgtacctgaaagaccttctttttgggggttaaatattggtaaattttttccgcagacaatggtaaaacctgtgccagcttttcagctgtcttggttttattcactacatactcaggtttattcttatagttgatcgaagtcttatctaaaatcgcataaaccgtatacaaatgcgaatcttccgcaattgttaatccatttcgatcatagatagtccctcgcgtggccttaattacctgattgcgcttataaagctgcttggtacgctgtgataaattttgaccattaactgtcttggatattccgatatataaaaatctagccgtaaatacaagaaaaaccaaagccacggccatttggagaaatctccccaccgtaaagcggtagccgtgggctttggatttttgtaattttaaattactgttttttttcattaacgaatcgtcctaatatttttgttaattagagttaatcctttttcacgtgcaattttatttaaacgtgaagtagaggtcaactccccaatctcttgacgtaaatcggtaatcttattctgttccttagcaactgtttgttgagttctagtcaattcatgttgagccgaagttgcagaaatactagaagaaactagaaagatcatcatgcccaacgtaatgacgcttccaataatcatcaaagctttttctatgccactataaggaactttacgcggatcaaggataattcgttgtcgtctttgcgaaccatttctactacttggttcatattcaatttttcttgctgagctatcagccataacattttcctctttataacttctctgcaacccgtagttttgcactgtgtgagcggttgttgttctctaactcagaagtagaggctacaattggtttgtgatttaccaaacgtagcgttggcttcataccgtccggtataaatggcattcctcttggcacctcaacttctgaatacttcttaaaaatccttttaacgatcttgtcttcatgagactgaaacgtaattacactgattcgaccacctggacgcaatatcttaattgcttcctctagcgaagcttgtaaaacatcaagttcgtgattaacagcgacccgcaaagcttgaaaactcttctttgccgggtgccctccagtccttcgtgcatacgcaggaatcgcatctttaatcacatcaactaattcaaaagttgttgcaattggcttttcccgtcgtctttctacgattctgtgagcaatttgacgagaaaacttttcatcgccatattgatacaaaatatctgccagttctttttgacttaaagtattaactaactgataagcatctaagtcctgactttgatccatcctcatatctaatcgcgcatcataacgatatgaaaaaccgcgatctgcttgatcaaattgaggggaagatacacctaggtcatagtaaatgccatctattccatctgagtaacccagttttaccaggtccttttccagattactaaagttgtcatgtaccaattctaaccttggctcactatccagttgtaataaattcgcaaagttcaacttcgccgattttatcgcatattcatcttggtcaaaacctacaagcgtaccggtgtcaattttgctgagcaaatatttagcatgtccaccaccgccaaaagttgcatctacataaagaccaccgttttttggtttcaaattgtcgatagtttcgtgtaagagtacactggtgtgtttgaatttcatattttttatagttcaatgtcgtccaaattttcagcaatatcatcatagtcttcgttagcttcttcttcaaaactagtccaacgttcttttgaccaaatttcaattcgatcagagacaccaatgatgacacattctttaatgagtttggcatgcattttcaacgttgttgtcagattaacgcgaccttgcttatcaaactcacattccatcgcaccagagtagaataaacgcataaatttacgtgtattcctcttagtcaacggaagttttgctaatttagcttcaatcttcgaccactcctccatcgagtagccaaaaatgcagccttccattcctcgcgtgaatatcatcttgtcgccaatctgatcgcgaagtttcgctggtataatcaggcgacccttgctatcaagattgtggtgatattcacccatgaacatggtctagcccccttccactaaataatttaccacaattccccactctctaccacattcataagaaaaaaatacagatttttaaatttcttttttattgtgatttttcaaaataaaaaaaagtcacaaaatattgaaattttgcgacttaagcatatacaagtaattttattttataacactagcatcaataaaagtccgatataccagaaaacagtacaggcagtcaaataatcccataattttctaactgtttttcctaaagaaatatttttatttctaatcgcatcgttcagcgacacaacaatcactaatacaaaatagcataaaaaaccataaggtaaaaaagaaggtttattcatatgtaaagtaattaatccacaagctgaaagaaagaaaaatggcataacatcgtaccctctaaactgtgctttagggaaaattttattgataaaaaaagcaactactaagccaataattggaattaggaaaatataaagcataagtattcctccattctttttattctaaactataattgatttgaaaaaaaccgttaataagcataaaatattgttcaaataggagggctgtttatggcacgaaaaaagaaaaagaaatcaggttttcaaaaattaactattgcaatggcttggatcatggcaattattactttagcagctgttattgctcaagctgctatctcacttcaaagtttttaaggattaaaaagacgcgaaagaaaaaatctcaatgtcattaagttaagacattgacaattaagggtgcttttttagagatcgaatcatttggattcgatctctttttttgtataaaataaaggcgaaaagaccagccttttcgcctatcttatatattatatattttaaaccttcaaaattattgccagaaagatggtgttaattatgaaagcccttcataagaatattctagaacgtcttgatcaaattatcaataatactggggatcatattcacgattttattaataatcctcatgcttttaccaggaaacgcactttagatgcagcgacagtccttaaaactacaattaacatgcaaggtcagaatttaaacagtgaactctttagagcttttggcgaagatgcaactaaaaagaacgataaagtagttagtacttctgcctatgttcaacgcaaaagccagctttctcctgcttgttttaaacatattctgactgtttttaatcaaaatctatttaatattcaactttttgatcatcactaccgtttgtttgccattgatggctctgactttaatcaaatctggaatccgaaatcgaataacattgtacaagcttcttctcataaaaagaaaccctattgtcaaattcacgttaatgccttatatgatctattgaataatacctaccaggattgtatttttcagcctaaatcagaaatggatgaacgcaaagcggctgttcaaatgcttaaagctttgaattgtggtccatatattgtaacaatggatcgtggctacactagtttcaatatgattgaaaactgcaatcgcctgcctaactgtcattacataatacgaactaaggctggacaaggcggagttaaagaaataacgacattgcctgatcaagaatgtgatcgtgagatttcctgcctggtaactacttctaactattactacatcacgcataaagccagtgagaatattcaccatgtccagcatcattatcgccaatatattaagtatcgctctaaaaatacccaggatctaagctgggattttggcgagttatgcacaataaaatttcgagcctgcaaatttagaattaatgatgccaaatcaggcaaagaagaatgggaagttgtgctaaccaatcttgatcgaaaaaattatccgctaaaaagaattaaagagctttatcatctgcgttggggtattgagacctccttcaagaaattgaagtattctttaggcagtgtacagttccattccaaacaagataaatttattgaaatggaaatttatgcccatatgattatgtttaatgcaatcagtcaaattgatgcacaggcctatattccgcaaaagcattgcaagtatcaatatgccatcaatttcaagcaatcatgcttgattattcagagcatgtatttggcttcttctttaacgcaagattttgaacggatccttattcagatcagctattataccattccaattagaccaggccgcaaggacaagagaaatattaagcccaaatcagctgtatattatttatatcgcgtagcttaaaaaagcagaatctgtgctatgccttatttgttgtacgaaaaaagcaccaatttaaccaattaaatgttaaatcagtgctttaaaagtctaatattaattgtcaatgtcttaacttaatgacattggaaaaaatcttccgcgtcttttttaaactcgataagcgtttaaatcaattaagaatggataatcctgagctaaattgccccaaatccaatacaagagaaaaaagaagacaactgcccaacctaaactgactaaaatgctcattaataatacgtgtgctgatgcagcactaatacccaccatattaaaaatgagccaactatacgcaacaaaaactgcagttcctaataaaacgacaattaatctagcccataacatttccggtaaaaaacgagctgttttttgacagatccagcaacttgcaggtaggaaaactgtataaacaccgataatgccataaaaatagatatcagcaacaattcctgcacctaatgctaaccaaatttcattatcattagtatcatcaaacagaccaatcaacattacactgattggcaaaatgacgcttgacgctgcaaagttgtcataagtcataaactgatgtaagtaaagtgcacatacaccgtctactaccaatgcaataaataagccaattgccaaaacccattttcgaaacgtagacattaattagccacctgtctttcaattacagttacaacagatggatcactaatatcacctgctggtttaattctaatctgatcagatagaccaaatgaatcacgagttgtcgtagtaactgtaccaattaacaagccttttggtgagttaccgcccataccactagtatatactctcgtgccggccttcagtttgcgaccatcaaccacctgtgtaaaggcaagataattattggaagtaactgtaataataccatgtactgtttttccattcgcagcatccgcttgaacagagaagcgattagccgactcatcagtagtagtaagtaattcaaccttggaagaagcagcatttgcttctacaattcgaccaataacaccgccatcgcacatgacagccatattctttttaattccagctgaacttcctttattaatcactaataaatctgaccatgtatcaggcgaccgagaaataacagaggcgttgaccatggtatagccacttaacgtatcttttaatttcaatgcagacttcaattgcctattttctttttcaagagctgaattgcgagccttcgtctggcctaaattagtaacttctcgctttagatgattgttttcttcttgcgtatttaaaatatcatgaacactatttaatccgcctgacacgagccctactggtacatcaacaattctagtacctaaagcaacgacatcgttacccaagctttgaatcagtaaaggtgtattgcgcctattgcgcaagctaacactcccacccaaaacggataaaataacaactactataataaatgctgataataactttttattttgcagaaattttttcattaagaattgatcctatagaaaaaccggcaacagccggcttttttattatttgcgacttctacgcattacttcaatattcttgagtgattcaccagtaccaattgctacacaatcaagtggatcttgagcaataaacacaggaaccttagttgcttcagaaataacttctggcaaattcttcaagagtgcaccaccaccggttaaaacaataccatgatcaataacatcggcagcaatttctggtgaagtttgttccaaagtctccttaatagctacgataatgtcttgaactacatcttgaatagccttggcaacatcaactgcttcaatatcaacagattttggtaaaccagttactaaatcacgaccacgaatattcattgattcaatttctttagccttttcaactgaagctgaaccaatttgaattttaatgtcttctgcagttctttcaccgattaataagttaaagtttgagtgaacatagttaacaatcgcattattaaacttatcaccggcttgacgaattgaagttgatgaaacgattccacctaatgaaattgtagcaacatcagtagtaccaccaccgatatcaacaaccattgaaccagtagggtccataactggaagaccagcaccgattgcagctgcaaatggttcttcaattacaaatgcttcacgagcacctgcaactctagctgcatcaattacggcacgcttttcaacttcagtaacacctgaaggaacacataccattactgaaggcttggaattaccaacagtcttttccataaaatatttaagcattgctgcagtagtatcgtaatcagcgattacaccgtccttcattggacgaatagctacaatgctgcctggtgttctaccaatcatttcttttgcttctgaaccaacggcgattacttcgcctgtttgtgtattctttgctactactgaaggttctctaagaacaatgcccttaccttccatataaacaagtgtattggctgtacctaaatcgataccaatattctttgtacctaatccaaacacaaaaatctctccttaactgttgcggtctctaaatcttgactaattatagcatactataactttaaaggcgcctttcacacaaattttaaagaactttaaaacaatttttctcacgcaaacttaaatattgaccttctcccacgataaaatggtctaagaaatcaattttcatcatttttgcagcttgacgtaaactttcagttaattccaagtcacttgcagatggcgttaatttaccactaggatgattatgagcaataaaaattccagagcagccataaataactgcccaccgaaaaatttcccgcggatgagcaattgatctattcaaagtcccttgaaatagtttcttctcagcaataatgtggttgctattgtcaatatacaatgcccacaattcttcctgcttgtgtcctatcagcttatcagctaaatacgtacctacttcaatgctagatgtcaaaattgtctttctcttaggtgaagcgcagcgcaaacgatctagtactgcctcagccgtaatagcaagttcatccgagcattctgaactggtaataaactttaatagatcattaaacgaatttaaccctgtgtttttcagaaaaacatttaagtcctgcaacgtatgaattcctttattttctagttgttcaaataattgtgtcaatagctctaaatctgttttgacaaagtaatgatttggttttctttttaacataaaatccccctcattacttattacgcaaaaaagagctaaatttttttcagaaattcaaaaaagttttgacaaatcatcgttgcattctgcttatctttaacagatggtgctttcaaatctggtaccatcacacattttaaccctgcattagcagctgcttgaacaccggttgatgaatcttcaaaaactaaaatattttctttaggtaaattcattttcttagctgcttctagataaatatctggtgccggcttagccttaatgtgacctctttgtacatcaagataactaagatgaaaatcaaaataatttctgattccagtcacccacatagcatgctgaactacattttcataattacttgaagcaatcgccatcttcaagccacgcttttcaaattcgtctaatgcttcttgaacaccaggttgcagctttaactttccctcatcagtccattgccacaccaagtcatcagttcgcttaataaaacgatcacggtctgcttcagttttaaaatatttatgataaaaatcctgcatctctttaactgtagcaccagttaacttgagataagcatcccgcggcgtgcccaaattctcttcttctgccgcctgaatattagcatcccaatacagcttctctgaattaactagcaaaccgtccatatcaaagataatgccttgaatatcatcatctagcccttgtacgcgcatcacgttttcctttccaatttaaaatagcactaaccaaataaaaggatccactaacaattaaaatatcattagctcccaagtgatctcgcagctgggtaaaagcagctcgataatctttttcataattatatcttttttgtacatcaattggaaaatcatcttttttagctactcgcggataagataaagttgtcagtaaaacttcatctttatcatcaaacaagctaaacacctgctcaagatccttatctttcatcatagtcactaaagcataaagcttgccatgcttttgctgggtcatacgatgaacgactgccagcaaattactcattgcctgaatattatgtgctccatctaaaatgattagcggattttctcgtaaaatttgatagcgccctggaataatcgtttgattaatcgctgtttcaacttcttcatttgataaaggcagtttcaacaaaaagaacgcctggcaggcaacggcaatatcataggcttcaacttgtggtcgtaaagcaaaaactagctttcttttgtgatcttgataaacaatttgattatcaagcaaaacactaaagtctcgtcctaattgataaactatcgcatgttcttcttcggctttacttttcaaaattggccaaacaacttctggcacgttacctaaaactactggtctttttgccttaataatgccgcttttctcacgtgcaatatcctgaattgtaggtccaataattttttcatgatcgagaccaattgtagtaataacacttacttctggcataattacattagtcttgtcatgttctccaccaattcctacctcgataacagcataatcacactttttttgagcaaaatagacgaaagccagtgcgacttcatattcaaaggttactaacgaaaaagttgagtcctgctgctgcaatttctcataagtaccctgcacaatattagctgttttaactaaatcctgatcactaatattttgattatttaactgtattctctcattaaattcatagacatacggtgagacaaaaaggccagtcttttgaccagccttttttagtaggtttgataaatagtatgaagttgaacctttaccattagtgcccgtaatgtgaatcgttttaactagatcttgaggattgcctaattccaacaataaccgcttaataaaagacaaattatttttaggatgtaaatgaggcaaagcatataagtaatcgattacttcttgagctttagtaaatttcaattatttactctctttcaaatcttgaattctttcacgaacaccggctaattgactttcgtagtcagccttcttttccttttccttgttgacaacagcttctggagcgtgaccaacaaagcctttgttagccagcttcttttcacaacgagcaacttcgtcttcaagacgcttttcttctttttccatcttttctagctcatcgtcaacattaacaagttcagttaatggaacaaaaatttgtgcgcctggaattacagcagtcttagctaattttggtgcttcaacttcactagctacagtcaattcctttggatgtaagaagttttcaacgtaatcagcattttcgtccaaaacgcgcttgttagcttcatcgtctaattgaatcatgatgtcgatttgacttgacattggtgcattaacttccatgcggatgttacgtactgctttaatagtttcaattaagaaggccatgtcttgatctgcttgcttgttttcaaattccttgtgagtagttggatattcagcaaccataactgacttaccttcatgtggcattgaaagccataatttttcagttacaaatggcataattgggtgaagcaaacgcaagatttggtcaagaatccaaattaagttttcttgctttcttgcctttaattcttcatcgtcaccattcaaagcaaccttagaaatttcaatataccagtcacagaagtcattccaaataaagttgtaagcttcacgaccagcttcaccgaattgatattcatcaaacaagcgagttacttcactaacagtatgattcaagcgatcgaaaatccaacgatctgataaatcaaatttagaagcatctggcatatgagctggtttagcatctgctggcaagttcatgattacaaaacgacttgcattccaaatcttgttaatgaagttccaagcagcagataatttcttaggatcataacgagtatcttgaccaggagcagtaccattaagcaagaaccaacgaagggcgtcggcaccgtatttatcaactacatccattgggtcaacaccgttaccaagtgatttactcatcttgcgaccttgttcatcacgcattaaaccgtgtaaaacaacatcattaaatggacgcttgccagtaaagtgcaaactttggaacatcattcttgatacccagaagaagataatatcgtaaccagttaccaaggcattagttgggaagtagcgcttaaagtcttccgcattagtatcaggccaacctaaagttgaaaatggccataatgcacttgagaaccaagtgtcaagtacgtctggatcttgttcccagttttcaatgtccttaggtgtttcttcacctacataagtttcaccagttttcttattgtaccaagctggaattcggtgcccccaccacaattgacgtgaaatacaccagtcgtgaacatcttccatccagtgatcaagagtttgttcaaatcgttctggaacaaagtttactttgccatcagtcttttgattttccaaaactttgtcagcaagtggcttcatcttaacaaaccattgcttagaaagacgtggttcaacttgaacgccagaacgttctgagtgacctactgagtgaacaattggttctatcttaatcaagtaaccttcttctttaagatccttaactaaggcttcacggcattcaaaacgatccataccagcatacttgccagcttcttcgttcatcgtaccatcatcgttcataacattgattctttcaagattatgacggttaccgacttggaagtcgttagggtcgtgagctggagtaatcttaactaaaccagttccgaattctggatcaacgtgttggtcttcgataattggaatgtgacgaccaacaagtggcaagatcaattctttgccaacaatatccttgtagcgcttatcaccaggtgctaccgcaacggcagtatcaccaaacatcgtttcaggacgagtagtagcaatttctacataacctgaaccatctgcaaatggatacttaatatggtaaaaggcacccttatcatctttgtgaataacttcgatatcacttaaagcggtttgaagtgctggatcccagttgatgatgtattcaccacgataaattaagccttcattgtaaagctgaacaaaaacctttttaacagctttagaaagacccttgtctaaagtaaatctctctcttgaataatcaagtgaaagccccatcttagcccattgacctttgatgattgatgcgtattcatctttccaatcccaaacctgtttaacaaaagcttcacgtcccatttggtgacggtctttgccttgtttacgcaattttgcttcgaccttagcttgggtagcaataccagcatggtccataccaggaaggtaaagagtatcatagccttgcatccgcttaaaacgaattaaagtatcttgaattgcagtatcccaagcgtgacccaagtgcaacttaccagttacatttggtggtggaataacaattgaatatgggtgagcttttttgttacctgatggcttaaataaatcttcatcaagccaggtttgatatctacctttttcaacctcgtttgggttgtatttaggtgctaaatctgtcataaaattcctccaataaaaaagtcctagacatattgtctaggacgatcagttaaaccgcggtaccacctacgttaagcatgtatcaaacatgcttctcttgaagacgataacggcgtataccggattaacctactttttattttcaattaatcagctaatcaagctactagtcaaccttcggcctctcagctgtctggcttttctctgttaataaagtcgacccctcttgattcttgctttggttatgattatagcatgaacttcactcagaaaaaagggttaggaattagtcgtaattaagttagccatatgtctttattcttttaataaatcagcaatacatttttccgatgaatgatattgcttatattgttttaacacgttgattaaatcatcatagtgactattccaaaaataataattttcatcataagatttcacactcttaagatcgttataatactgcttaacaaaatcactaggcttcactttacttttatagttatttgtatatcgctgatagtcttgatgataaagaatgtctagaatttcaatctcaggtctagtacgaagttctactacttcggatactttctttttatacacttctggaagattaaacttttcggttttggaatcaagtatcctataaattttaacctttctacttctaaaccctttattcaaaaattctttagcaaactttttagcatttcgtgctctaattacttcaccttcaagaagatcatcctcgttgaattttagtgcatcgtgttccaatagaacttccataattgctcgttcagtatgaccttctacaataatagcgattagatctgtagagttactcatccattttaactgccttttctgtagccttctttaaagccatgtaggcatcataatctggagctgtcccacctaaataatctgattcaaaaacatcggctttatttagatcgcttcttacatcagcagttgaatatctttgaagctgaatcttgccttctctcttagtaatatattcttcatcagttctttcaattttatccaaaatttcagtatagtgcgtactaaataccaaagtagctctatttatgttgattttaggattagtaaaatactcaataaaagaatctacaatagcgtgattaaagtgattctccaactcatcaataaagatgatgccaccaacggaaagtgcattaattacctcgccataaagagttatccctttagctgtaccagaagacaagtattttgcaatcgttgtaaaatcattttctgcaatctctgtatctttccctttaaacttcagcttaaacaattgtttagtagcaccagagccctcaggcttgttttcaattttaagatattcaattgttggatctaaaaagtttaaaatttctccaggcacattgccagaaccatacatcaatgcattaaagtcagtaaagaacaaagtatcaaatggtatttgaggataatacttatttttcgaaataatcgctctaaaaatcgaatcatcagacgacaaaattgaagaagctaggtcgcctaattcttttctgtctaattctggttttatatttttgaaatcaaataattttttctttgaaagattaacagttaccttttttcgatataccgtttcagactcaatatgccagcttttacttaaagttttctttaacttgaaaactaaactatccttataaactacatgatcagttccataaaaataagttgtaacactaataggctcatttcctattagcacatccgttagcttagtttgatcaattgacttttccatcacaactgtttgaagaattcctatcaagagtttcatgatcgtagtctttccagtagcattagtccctactagagtgattaaattattcacccataaactgccgagcaaatgagttaatcgatcagaggtattagaagtaacccttgcatcactgaccagtgaaaattcaagatcatcctcaaatagcggatgattttgaatttctaattttaaaaagtataatttatttttattcataattattcacctaaaattgttttattcaggctaaattttatcatatttttgcattttatacataaaatctgtttaaaatataaataatcctcatcaagtagttactacttcatgaggattatctaaaatattctactttctaatcatcttaactgcttgaatcaaaatcgttggaatcagagccaagccagcaagccacattacttcttgcccagttaacggagtaactgcaaacaagctatgtaacgccggtacaaacaaaatcaaggctaacaaaattgttccgacagcaaatgctgctaaactgtaccagttatttttgaaaccgatcttgaagatactgtgttgtgaacgacaattgaagccatgtaaaagccgagcaaatgtcaatgttgagaacgccatcgtcgttgcaactgcaggactatcttttagtccgatcaaaaaggcagcaattacactaatcgaaatcaacaaaccttgaatagtaatttgactcacaaaggctttgtccaaaataccagccttaggatcacgtggcttacgtttcaaaatatctggatcacctggctccattccaattgctaaagctggaagcgaatcagttaccaagttaataaagagcaattgaaccgctacaaatggtactggtaagccagcgagtgaagcaaataaaacagtgataattgctgaaaggttacctgataacaagtagccaatagcgtttttaatattttcataaactgttctaccgttagcaacagctttgataattgtggcaaaattatcatcggccaaaatcatgctggcagcatctttagatacttcagtaccagtaatccccatcgcgacaccaacatcggccttcttcaaggctggtgcatcgttaacaccgtcaccgatcattgatacgatacgatcttttctctgccatgcattaacaattctgatcttgttttcaggcgatacacgagcataaaccgaaatcttctcaatgttttgatcaagttcttcatcgctcaaagcatctaattcaaggccagttaaagccatgtcaccttcattgaaaataccaattttcttagcaattgcaacggcagtcaccttatggtcaccagtaatcatcacagtcctaatcccggcttccttagcacgagcaactgcagctacactttcttcacgtggtggatccatttctgaaacaaggccaataaaagttaagccatcttctgcttcagtagaaagctcttcatcactttctttataagcaaaagccaaaacacgcaaaccattttctgaaaagtaattgttttgtgccaaaatttctttacgatcttcttcagtcattggacgaatttcatcgccgaaacgaatattgacacagcgtttcaagagcacatcaattgcacctttaacaaaaatagttggtacagtatgaatcaaatgcttagtactcatcagcttacgatctgagtcaaatggtacttcttccagacgcttagaatgttcgcgtaattcttgttctgataagcctaaaacaccattacctaagtcaattccgggcacttgacgatacatttccagcaaggctgactcagtcggatcaccaattgccttatcttcggccaaacttgcatcgttgttaagcactacatcataaagcaagtagcggtgaagttgattactcaaatccagctcatttggctttaaaactttaccaccaatatagatgtcctcaacagtcatcttattttgagttaacgtaccagtcttatctgaacaaattactgatacagaccctaaagattctacggctgccaagtttttaataatagcattttctttagccattttttgcgtacccattgcttgcacaatagttacgatagaactcaaagcttcaggaattgcagcaacagctaaagctactgcaaatagcagtgaatcaagcagcggttgaccacgccacatttgaataccaaagatcacagcacacaagattaaaatagcagtagccaatcgtgatgaaaactggtcaagtgatacttgcagcggagtgcgacgttccttagtttcattcatcaaggaagcaatcttaccaatttcagtctgcatccccgttgccgttaccacaaccgtagcacgcccataagttactaaggaactggagtaaaccatgttaacccgatcagctagcggcacttctttttcaaaatcagtgtccaacttgtcaacattagtcgattcaccagttaatgaactttcgttgacttgcagagaataattttctaaaattcgaccatctgcagtaactaagtcacctgcttctaacaaaagaatgtcgccaggtaccaagtccttggcctcaatctccattttttggccattacgcaaaactttagccgttggcgcagataatgactttagcgattctagcgacttttccgccttaacatgttgtaccgtacccaaaatcgcattcagaatcaatacaacaataattaccaacgtactttccagactgcccgtaaaagcagaaattattgccgcgataattaggatgatcaccattaagtctttaaattgttctaaaaagacctgaaaagtaattttcttctttccttcaactaaagcatttggaccaacttgagctaatttctcttgagcctctttagcgctcagcccctgctttaaatcggtatttaactctttagctatctcgtcttttttctgacgatagtattccatgtaaagccctccctaaacataagagtaatttaagcaaaaaaatagagactactggctaaaacactgtttagtcaatagtctcatcatttaaacttacagcggaaaataaatttcgttctgacgccgtaaatacaatttatgccgattactccctatttacttgtacataattaaaccatatcaagtaggtagttggcaagctattttaactttcttttaggaagttttctaattgttcatcggtaaaatcagaaccgtaattttgttcaaggagatgcatgatctcttgcttggtattaccagttcttttaagtgaagaaactaaaattttgacgcctcgtttaagtccctcttctttaccttcctcacgtgcgtcttgttctcgctccagtattttctcttcgtagtccatgatataatcactccattccgagcaataagataatcatttgtacttcttatctttcaataatccgttagcaatatcagccgaactaactggtacaccgactaaacgctcatttttccacaaatcaaaaaaatcagctggcatcatttgatcaaattcatcatctgaattcattaaatccttataaacacgtgacttctcaaataaatttagagcctgcttaggataaatgtttaatctcttagcaattaagtcgctaattgcttcagctagttgctgatgaaattgcttttcactaatttcgggaatcatctaaccaactccttatctatgaacgttaaagctttgagagctctttctgtcttgaaacaatactgctccgaataaacactcggttttaattttagcagagcctcatctaaatctagattaccatgtttccagcaattaacaacagaaaaaagtttaccatctgctgttgggccaatgacgatatcagaattatcttttatattattcattctattttgaatgacaaacttaatccaatcaatatctgcttggtaaactaatattttcaagtcgggttgatcagcatcgaatacatatctatttaatgtcggttgacctgaatatctagccttacgctttgcccatttttctgcttgtctacgattagcagtcacataaaagccattaccaaaatcagttgtaaaaacatttttatttatacgaggctgataaacagcctgattgcttccatgatacaaaatgactttggtattgcttttcatgaatcgtgatgtatgcgtatttttcatcgcgcacctctttcataaatagtaggacaaaattatcctccactatttattacgcaaaaaagcacgatttttttgtgagaaattaaaataaaaaaagaaaatgcctgagaattatatcccagacattcaccaatttacggctctttctcatttctcttccttcacaatataaattggtcgttctttaacttgtaaatagattttaccaatataacggccaataattccgatacacaaaagctgcaaaccgccaatcaataaaataattgaaattgtgctggcccagcccaaaatacttgaaccaggaactattagtttacgaacaattacaaaaataagaccaataattgacaaaatgaatgaagttatcccaatccaaacagctaagttaagcggtgcttgagaaaaatcagcaatcccgcccaacgcatatttgaataatttgtgagtcgtccaatcagtttcaccagctacgcgctcgacattgtggtactcaagatacttagtcttaaaaccaacccaagcaaaaatacctttagaaaagcggctgtattctttcattgataaaactgcgttaaccatctgcctggtcatcatgcgatagtcgcgtacgcctgaaacaatttccactttagaaatgcgattaatcaccttataaaattgattgctcaagaaagacttaaacttaccttcccctttacgatctactcgtctgcagccaactgcatcatagtcaccagtctgcaaaattttatacatttttggtaaaagtgaaggcggatcttgcaaatctacatccattaagacaatataatctcccgttgcagctgataggcccgcatagatagcggattccttaccaaagttacgagaaaaagaaatatagtgaacatgtttgtcctgctcatgcaattttttcaattcggtcagtgtgttatcattggagccatcatctacaaaccaatattcgggcgtcactttgggcattttagctaatactttttgcactgctggataaaaaagtggaattgtttcttgttcattaaaacaaggaaccacaattgataatttttccattagatttcttctttcttagcttttctaaaagtaactactttattaattacaaattgaattaaagttgctacaaaagttgctactattttaacgattaagtgcggataacccaatttagtaacgaaaataaatagggaaaccgtagtaaataccgtggtaatctgaccaacgataaaataagaaataaatcttaatatcatgcgatcatgaactttaaagttagtataagaattccataaaaagttattgatgatcccgcaggtagacgaaataatgttagctatttcaacattcatcttgaaatgcgtcaaaattgtataaattccaaaatcaacgactagccctaatacgccaattagaacatactttactaattgaacaaaatcttctgaatagattgctgttttgattttttccataattattcctaataaaaaatccagacaagaggtcctggatttcaacatatttaactaatatggtcttaattatatcattgtttttaagctctacgttttcattattaaagttaaaactttaataggaacaccttttgcattaattataatttttgtcattcaatctatctgtcttgttagtatcctcatacaaatgataggaactcttaatcttatgcctgccttgtggatcaaacatgcagagaaagataacatagcaacactttaaattttgatatgtgctgcatttcaaaatcatacagatttccatcaacatcctcaaccaaaatatcgagaataacagctttttgcttagggtgtttgggatcagcgacctttctctgcttctgcagataatgaatatctctaatctcaatctccggcaccagtccctgtaggacatgcttgcaaaaattcttgttagacataatctcaccaaagattacatcctctgtgaagccaaaccagggcttctttttcttgtgcgtattttccattgcgcacctctttcataaatagtaggacagaattatcttccactatttattacgcaaaaaagtgcaatttttttgtgagaaattgaagttttttaaagttttacccaactatatcttccaacttcaattccagatattctccccgctttaagttagcaggcaagcttaactttcccatcgaaattcgctctagctcaacgactttcatccctaccgcaccaaacatacgcttgatctggtgatatttaccttcacaaattttaatttcagttgtagacctatcgtgctcttcatcctgggataatatcttcaattctgctggctgcagtttggtcccatcgcctagtgtcattcctgaagcaaaagttttaacagttgcatcattagctacaccagcaatttcagcacgataaactttatcaacatgcttaccaggtgcaagcaattcatgattcaactgaccatcattcgtcaaaaggagcaagccagtagtatccttgtccaaacggccaactggcacgattccttgataacggtcctgcggtgcaagcaaggaaatcaccgttggctgattgcgatcttccgtcgctgacaaaacacctttaggtttattcaataagaaataatgatatttttgataagcaacagcatctccgttaacggtaacctgatcgctttctttaacttgctgctttggcgttttaacaatcacatcattaaccgcaacaattccttttttaattaattggtgtacttcttttcgtgagccaacattcatattggccaaatatttatctatgcgcattatgtctttctttcgttcttatgtgttgattaatattaattatataagaaagttaacccaatttcgaattgcgacactaatcaaaaacggtcgattttgttttcgaccgtttttacgcgcgttttgcgcgcgattatttgcttaaaatatattttgtagctctgccttcacccattcttctaatataaccttgtttttctagttgccgcaaaatcttcaaaactttcgtcctaccaaacttactcatttggctaatttgcttcgtagtatccgcaccttcatgaattatttgatatactttcttttcatcattagacagatcgtccgtaataaattttaaaactggcaatattatctttatcgaattatcaaaaatttcaaactgcggttgaaccaaactacttctataagaatcatttattcttcttacacctgtaccaaattgctcaattaatcctaacctaaagaaaacattagcaataattggattacgcaaaatggaaatctgacctgaaagatattcttctttgctaagtccttgtggcaatccacctggagatactacttcaattctgtcatcatacatagaaattttaatttgcgaattaatgttccaaactcgatgaactaaggcattggctattgcctcacgaaaagcttcttctggaatctgacttacaatatttcgcgttgctccctgtatttcttcatgttgataatattgacgatatttttgaattgcttgcttatactctttaagaatagattcatgctcataacttgctcgatcaagcataatattaatgctttcaccaaaccgaacaatatcaattccacgataattatttttgtctgccaaaagctcaccggcattagtgtaactagtatccttacgctctaaattaagcgtaatcaatatatcagatgttaaacttttaattcctatcttttcttttaatgcttcttctaaaatgttaaatgacaaattttggttcatcgcggttaaactatcataggttctattttcaccaattaagattaactgtgataattcagatcggtccacttcgatcgaagcactgtcattactcttataggcctttgatttgtataaatatggaggattaactccttgctttactgttaaagtaaccacattagttttaggatcaatttctaaattataatctggatttggtttgatcgaatcgttgattttattttcaacatttaaacaaaattcaactggatttttcacaccaacgattgatccatcatcctttattccaaatttaattttgccactgccataatttgcaaatgcactaaccgtttttagaaaagtattcgtcaatttctctttaaattctaaatttttggtttctctcatttaggtcaccgtttctaaactatttagttataattatactctttcacgcgcaaaaaaacggtcgaaaacgaaatcgaccgtttttacgcgcgttttgcgcgtgcctattatattaactttaaatcaatacataatactactagaagtttccatattaacaccatatctttctaaataattaaactgtatcatattaaatttcaaaaacaccagtgaaattaatcctctataacaagtcagcgtcttcttgagctttatcatccaagaatttttcatttggataaattggcgtaatctcaataccagccattgccctttcaatcaggccttcaacgtcaagacgagcttcatattcacgcgctttttccaactttggcttagtcttaggacgcggtggagcaaaaattgtacaacaatcttcaaaaggttgaattgataaatcaaaggtaccaatctcttcagctttggcaataatctccgttttatccattgttgcaactgggcgaataaccggagtagtagttacatcattgatagccaccattgattgcaaagtttgagaagcaacttgaccaactgactcaccattaaagatagccaagccgccacgttgtgcacgaatgcggtcagcaagctgcaacataaaacgacgttgcacagtcatcaaatagccttctggcagtttttccttgatcgtttcttgaatttcagcaaacggtacggcaataaaattaatcttaccagcgtagtttgccaaaataccagtcaattccttagccttagccaatgccttttcagtagtgtaaggtggactaaagaagtgaaccatttcaatatctactccgcgcttcaatgccagccatgaagcaactggggaatcaatcccaccactaagcatcatcacagccttaccagcagtaccaacgggcatcccgccaacaccatggagcaactgattagaaatataaacggcatcttgacgaacttcgattctcaagaccaaatcaggatgcttcatttcagccttcaagccatccatatgatcaaacaagtagtcaccaactagattattcaattgattagtgtcgtattcaaacttgtggtcactacgcttggtattaaccttaaaagtcattcctggcttaaaagtctcttgcatcaattccaaagaagtcttttcaatatcttcaagagtcttaggaatcttaattgctggtgagtaagtttgaattccaaataccttcttcagacgttggtcaacatccttgaatgatgcgccattcaggacaatgtgcatccgatcatgacgaggatgaaattcaatttgtgggaaatccttaagaactttttcaacgttacttgctaagcgattgatgaagtcctttctgttcttccccttagttgaaagctcgccatagcgaaccataacttctgtgtattccattaattttctcccaaatgattaattttagcaaaatgattatagatcttgtcaaagaccttaataaattcatccgcttcttgaagcgtattcgtctcatcaaaacttaaacgaattgcactagtagcaatcttatcatcaattcgcatagaaaccaaggtgctagcctcatctgccgtctttgatgcacaagcagaagtagttgaagtataaatatcttgatcttctagcgtatgaaccaaagtttcgccccgaattccctctaaagcaaagcaaagaatatgtggtgcaaagccatcgcttactggtgaaaaaatattaatccctggtttatcttttagataatcaacaattttagccttaatttctgcttcacgcttggccttttctggttcatcttctaaaagcaaacgaattgccttagccattcccgcaattgcaggcaagttctcagtacctgaacgcaagcccttttcttgaccaccaccatcgtgtaatggggtcagcatcttgccttcttttttatataaaatacctataccacgtggtgcatggaacttatgcgcagataagctcgagaggtctactcttggtgtaaaaaccttatcccaaatatttttgccaagtgcctgaacgttatcaacatggaactgaatcgttggataattttcaagcaaatcgctaatctcatcaattggttgaatggtgccaatttcgttattaacgcccatgattgaaaccaaagttgtatcagaatcaatcgcgtttcttaagtcattaacgttaactcggccttccttatcaactggcaatctggtaacgcgccaatccaaattctctaacgcgttaaaactattggctacagatgcatgttccacgctagaagtgataatatgcttaccaaattcacgcttttgaattgcagtccccttaattgcggcattatttgattctgttccaccagaagtgaagaaaatttcatgctgcttagtccccagcaaatcagcaatttgtttacgtgacgcctcaagcaattggtgtgcacgatcacccatcttatgcaaactcgaaggattgccccaaatattagtcgctactttattgtaagtatccaatacttgtggatctatcttcgttgttgcactattatcaaaataaatcactatcattaccccttcatttaaaaaacggtcaatcgcttgaccgtttcaagacttttcaattttagcttaaataatgaatcgcttcaattaattactcttctcttctgaataatatgcattttcaagtcgttgataactacctggctctaccttttcaattgctgtagcaattgtatcaagggcttccttatagttatattcattatatagctgcattgctgtcttttgtgcttgcgcaattgaatccttatctgcatatttatttgaatactgcatcgtcaattcaactaggttagcggaattaatgatgtcatctgcttcacgtttaagccgctccacatcatcagaaatttgaattaattcagctgagatcttttccatattaatccggacctgacttaattcgttgctgacatgaccaatctcgttgactaccaaagtgtacatttggacaaagctatcaggattgccaggcaaatttcgtctttcaagtcgacgataaactaatgaaacttcttgcttaaagcgcttgattgaatcattagctacattttcagaatcataaagtccatcaacgtcagttgacatcttagcctgctctgcatcaatttcacgcaggcgatctagcatctggagccatgaatcttgaatagcagagtaaacacccttaccatctgcgatattctgtgtatcaatagtgtactgatggtacatttcattgacttctttttctaagtctttactcttttccaattcgccatgagtcaattcatagctctcatcaatatgccgcaacttttctaccagtttctttgacgcggtttgctgatgtgagatcaaagtcagcattttactttgatttttttcaacaaatggtcttgccttgtattccttagctaaaacatcatacaggtcgtcaatttcgccagagatctttttattttccttggctaattcatccaccttagtctcagctagcaatttgcgcgcaccatcaatttcatcatgaatttccttgattctgcccaaaacatctacgctagtaaggtaatatttttctgaaatcatttttttataagcatcagacaattccttaagctgatcttggaacactacttcaagctgatgataaccctcttttagcggttttaagcgtttttgtaagttacccaaagacatccgaatcttggacaaaactcgcttagcttcaacatgatcaccttgtgaagaaagattttttgcttcttcaaagtcactctccattgatgctagttgatcttcaacctgatcaatcgcagcaccatattcaaaggaattggctaagatatcttttcttaattcacgataaactttaatcaaagcatcatattgaatttgattttccttatttgattcaagtagttccgtgaaaactgccttggtgttacgagcatcttcgagcgttggcttgataatctcctgtgcttgtttaatattctttcttgctttaaacaagcgataagttgcattttcattagcagcttcttcaactagcttatgcactcgcggtaattttttcttagctgcttcagtgtagctcttgcgccaagtatttaatgtagttaaactttcgccggccaaatccattttatccagtcgcgtaatatcatcttctagatgcatcttctcaatttcagtcactgctgcatcaatcgcttcaatttcttttagttgtttacgattgatcattagcattgctgcaactacgacaatgattaggatcaccacggcaataattataatagcttgaattgatgacatagtttatcctccaaaactatcataattataacaaaacctgaccctaataggtgcaaaaagctgttctattttcttgatttattattctgaactctatataatactattcgtgtaaaatatttgcagcaataagtgacaagaacgtcaacatcttgaaacgctttagtgaacgagtaacccgcgctgcattgggcgaaaatgtaaatccaagatgcacgaatgttgaacttatgcttaatattttactccaaaaattattgtttaaattttatggaggattttttatgtcaagatatacaggtccaagttggaaacgttcaagaagattgggtatttccctttcaggtactggtaaggaaatttctcgtcgtaactacgctccaggtcaacacggtcctaacaaccgcggtcgtttgtcagaatacggtcaacaattgcacgaaaagcaaaagttacgttggatgtacggcttaaacgaacgtcaatttagaactttgttcacccgcgctggtaagattcgtgaaggtcaacacggcgttaacttcatgattttacttgaacgtcgtttggacagtcttgtttaccgtcttggtttagctactactagagaacaagctagacaattggtaaaccacggtcacattactgttgatggcaagcgtgttgacattccttcatacgaagtcaaggttggccaaactattggcttgaaggaaaagtcaaagaacttacaacaagttaaggatgccttagaagcagttactgctcgtccatcatttgtttcatttgatgaaaacaaaatggaaggtactcttgtacgtttaccagaacgtgacgaaatggaaccagaaattgatgaagccttagttgttgaatggtacaacaagttactttaatttttacattttattttgtcgaaagtctttctcaatcgagaaaggcttttttctttgctacaataagtacataaaaagaaaggatgattagatgactgaagatttaaataaacgtgttgaacaagcagctcaaggtattactccacaaactaagcctgatgaacgccgcagatttttaggttcattacgtgagcgctgcttaatccgtatggacaatactgaagttaaaaatcctgaattaactgccctatttcttaaacatatcactgactttaagggctatactattttgatcaatggcaatatcactgatgatggcttcttgggagacattgaagccagttgcagcaaatatgatattcccttcactttagttaacaatgaaaccgcaaaaacaggaccacatgatacggcagtactagttgtagcgaaaaacgctatcaatcgaccacgaattgagctaaagcaagtttatccacctgagtttcctaaagaagaattagccgcacctaaaacaaaagaaagtttttggcataaactttttcacggagataagtaaatgaaaccattagcatatcgtatgcgaccaactaatttagacgaagttgttggtcaaaggcatctgattggtccaggcaaaattattcgccgaatggtggaagctagacttctgtcttcaatgatcctttacggccctcctggcatcggtaagacaagtattgctagtgctattgcaggctcaactaaatatgcctttagaaagctcaatgcagctactgacggcaaaaagcaattgcaacaagtagccgaagaaggcaaaatgagtgggacagttgtcttattgctggacgaaattcatcgtttggacaaaactaagcaggacttcttactgcctttgctagaatcgggacaaatcattttaattggggcaactactgagaacccttatatttcgatctcccctgctattcgttcacgttgccaaatttttgaattaaagcctctttctacagatgatgcttctcatgcaatcaatcgcgcattgaacgataaagaaaaaggtctaggcaaatataatgttgaattaacagatgatgcgcgtgctcttttgattgaaaaaggcaacggtgatttgcggtctactttgaatagtttagaattagctgttctttcaactaagcaagaattgcaagataaacaccaagatgatcaaaaaattatcatcactcaaaaagaaatggctgattcaattcaaatgaaggtgcaaaactttgatgcttctggtgatggacattacgatctagtctcagcatttcaaaaatcaattcgtggctctgatacagatgcagcgctgcactatcttgcccgattaattgaatctggtgacttagtctctatctgtcgaagactagcagtaattgcctacgaagatattggactagccgatccagacgcagctgaacacgctatagtagccatccaagctgcacaaatggttggcttgcctgaagcacgaattccactggctaatgcggttattgagttagctctttctgccaaaagcaatagtgccatttcagcaattgatgctgcactagctgatattcgaaccaaaaaagttgactcaattcccgccaacctaaaagatgctcattactctggtgccaaaaagcttggacatggcgtgaactacctttatcctcatgattatcaaaatgattgggtagcacaacaatacttgcctaataacctgcttcatgccagctactttgcacctaaaggcaattctaaaatcgaagctagatataaggcaacctatcaaaaattaaaacaaatgcagtctgataacttgcgcaataatcactaatctcgcgcattcaatatggttgacaagcacctgtaatatgcgtattataataagtgatctgagttgatcgacaagcttaaatgtataaagttgaccgatcaaactataagacgtgggagttggcaaataactaccgaatcggaatactgccttgttgcaggatccatattcgctgcgatgccagctaaaattttgaacattgcgggttcaacaagcgtcattatgctatgtttagtcaactcggatttctttagaatattaaaaaaggcggtctcaattgaccgtctttttctatagtggagactgttaaatggcaataaagattgtaatgattatttttatccttctcctactgttaacctcgtggtacatgtggcacagaaggaacggacattttttaatttatgacattggtggcgatccacgcttgagcaatattcttaagtggacttcagtcgcccttttagctgaaagtattttagggattattttgctattcatgggtaataaatatttaaatctaatcaccttattcttagcttcattaactattttggcttttggtttatcaattactcaaaataaagaataataattcactaatgacaagcaaaattttggtaaaatagaatatagaaagaggtgcttatatatgctttcacaatacaagaatattcaagttgcagttgatggttcaaaagaagctgacttggccttcagcaaggctgtagccatcgccaagcgtaaccatgcaacactagaaatcttacacgtaattgatactcgttctttccaaaatgtttcaagttttgattcagcaatggtagaacaagtttctaaagatgctgaaaagagaatgaaggattaccaagctcgtgccactaaggctggcgctgaagatgttcactactctattgaatttggttcacctaagacaatcattggacatgacttccctaagaagcacaatattgatttaatcgttgtgggtgctactggtttgaacgctgttgaacgtctgctcatcggtagtgttaccgaatacgtaaccagaacttctaaatgtgacgtcttggtatgtcgtactgaagaagttaaggatgctttgcaaggctaattatttagctttaataaccgataaaaaaatacctccaaaattcagatttgaatttttggaggatttttttaatgttatttctaaaaatcgccagccgtactgaacatgtaatcacgattatggaacttcatcgacaagattaatccaatcccaatcatgtttcccatcagagctgaaccaccctgagaaacaaatggcaatggaatacctgtcaatggcaataaatcaatattcatcccaatattttcaaatacgtggaacaagatcatcatgataacaccagttgcaatgtatgaataaaagacatttctggtatcgaacgagatttttaccatttgaataatcaggtataaataaatcaaaatcaatgctacacagccgacaaaaccaaagttttcaccaattaccgagaaaaccatgtctgatccacgaactggaacataaacgctagctttgccaaaaccattaccaaatagttgaccagaaccaatggctttcatactttgccataactgataagctcctgatgaagtatcaccagatggatcgagccaagacttaattcgttcaaattgatatgcttgaaagaaatgactcaacaatgattgcccagccgacgtagttactaatacaataaccccaatagctgctaaaatcaaaataccatataacggtacaataattttccaagaaatccctgatactaaaaccacgccaccaacgatggcaataaatactaacatagtaccaaagtcattctgtaactttagtaaaattgctaccggtgccagccaagcaataattttgcctaataacaaccaatcggtcttaatcgtgtgaccatatttatcattatgctctttgaccactcgagccaacatcaagataaaagctggcttcataatttctgaaggctgaaaagtaatcggccctagtttgaaccaacttttcgcacctgtatctgcagctacgcttctgttatataagaatagcaccgcaatcagcaaaaatattccgattccaaagaaaattggcgcaatcttaaacaactgttctgcatcaaactgcatcacaaccataataattgcaattgaaatcaagtaccataatgcctgcataactactgccctaacaggtgaaccaatatgactaggatcacctaatgcagcaacatagatacaatacaagctaattaaagccaagagtagcactggtataataatattccaggctaatcgatcgaatagacttgtttcattttcaacttttgccattaaataatcactacttatattttatttttcatgtaaggtaaagtatgaaagtaagtcattaatgctgctttcaagactgttagcaaacaaaatattgcttgtcttagaagtagtagcacgataacgcccctctaccttttcaattaaaccaatggactttctattaggaataacaacttcccacgttggcaaattctttcccttaagttcattaacttcaatatcaatattctctaattttttagacataaatcctcctacttgctatccggatgaaattttgaagcaataattggatcttcatatctctccggatgtggatttcgaaaaatagtaaaattatcaggaactggatccactccacccttgataaatgggttacaccttagtatacgacaaattcccataatcagccccaaaataggaccatgttttttcaatgcatcaatcatgtaattggagcatgttggataataccgacaacttggtggtagtaaaggtgaaatcactgtctgataaatacgtacaataaaaatcaaaatcttacgcaagtaatctcctcacttagtgtcgttgatgcttttcaatatttttaagcaaagtacctgttcctaaagcaactgcttctaatggatgatcagcaattaaaactggaacttgcaaataataagaaatcaacttatcaatattctttaatagggctccaccacctgttagcatgattccgcgatcaataatatctgctgaaagctctggtggagttgtttccaatacttctttagctgctgcaatgattgacatcaagcctggttctaaagccttttgaatctctggtgcagtaactgtagtctgcttaggcaaaccatcaactacgtcacgaccacgaacagtaatttgttcatcttggtctggttcaaaggcgctaccaatttcaatcttaatttgttcagcagttctagaaccgattaacaaattatgcttactcttaatgtaactgatgacagcctggttcatccgatcgccagcataacgtaatgattgagaagttacaatttcacccattgataaaactgcaacgtcagtggtacccccaccgatatcaatcaccatattaccttgcggtttaaaaatatccaagcctgcaccaacagccgcaactttaggttcaaagtctaaataaaccttgccgccaccagacttttcagctgcctgaataattgctttttgttcaattgaagtaactccagtaggagcacaaatcaaaatatttggcttggacataaagccttttacatttaatttttcaataaagtaagacagcattgcttcggtaatgtcaaaatcagcaattaccccattcttcaaggggcgaattactcgaatattacctggagttcttcctaccatctcatatgcctctgaaccaactgcaactaccttgtttgtatcggtatttacagctacaacagaaggttcatttaatacgatacctttaccagagacattgatcagtacgtttgctgtccccaaatcaattcctatatctcgtgccacgataaccctccataattattcaccgtccattttaccataaataatcatgactttcctttactgtccttgttttaacacaatctttaaaacaaattactcaattgcattgaagtatcgataaaagtaatgacaaaattgccaactaaaaagcctaagccaattgcaataaataaatataataattgcgtttcaaaaacatggcctttacgaataattttatctagttgaattgctttaactgcttgaaaagataagccaatcgcaatcaaatatataatgatactaataatgacatgaacgcctaattgaaacatatattttcctcaattttgacaaaaaaagacggatgcagcattttgtgcattcgtctcttccttcttctagtgacctttagtgttgtacacgctaattctgttcattgctcgtcttaaagcaacttcagcacgtgccatagtttgttcgtcatgtttttcccgtgcttccttcaaacgttgctcagcgcgttgcttcgctgcctcagcacgagaaacatcaatgtttcttgcgcgttcagcactatctgcaataatcgtagcaacattattcgaaaactcaatatagccacccgaaatcgcaatatgatcaactactgaatccatttcacggcttcgcttaatcttaacctcactaataactagtggagttaaaagtggtacgtggttatacatgattgaacgttcaccatcaacggcacgtacatcaacgatacttccacgatgtgaataaatcattccattaggagttacaacatctactttaaaaagcttctctggatctgccatttgacatcaccctacttttctagtaaagctttagcttctggatcacttggagttacacccatttcttgtgcttttttcaaaacatcttcaattgggccgacaccacgaaaggcatcttctggtaagtcatcaagatgaccatccaaaataagcttaaagcccttaatgctttccttaattggaacatatgaacctggtacaccagtaaattgttctgcaacaaagaagttttgtgacaagaagaattggaccttacgtgcacgtgcaacgatcaatttttcttcatcagacaattcatccatacctaaaacagaaataatatcctgtaattcatggtaacgttgtaaaacatgttgtactcgagtagctacttcatagtgttcttcaccaacaacttcagggtcaagggcacttgatgaagattcaagtgggtcaacagctggataaataccttgttctactaagctacgttccaagttagtagtagcatccaagtgtgcgaatgtggttgatggagctgggtcagtatagtcatcggcaggaacataaacggcttgaattgaagtaattgaacccttcttagtagaagtaattctttcctgcaattgtcccatttctgttgctaaagttggctgataaccaacggcacttggcatacgaccaagcaaagctgaaacttctgaaccagcctgagtaaaccggaagatattgtcgataaagagcaacacgtcttgaccctcaacatctctaaagtattcagcaagtgtcaaaccagttaacgcaacacgcattctggcaccaggcggctcgttcatctgaccaaataccatggccgttttacttaaaacgcctgaagctttcatttcgaagtaaaggtcgttaccttcacgagttctttcaccaacaccagtaaatacggaaataccaccatgttcttgagcaatgttgtgaattaattcctgaatgatagtagtcttaccaacaccggcaccaccgaacaaaccaactttaccaccacgtacatatggctcaagcaagtcgataaccttgataccagtttcaagaatttcacgactagtagtcaagtctgcgtacttaggtgcttccttgtggataccttcacgagggtgatcttttgaaaattctggaccaccgtcaattggttgacccaaaacgttaaacacgcgtcctaaagtatcttcaccaactggaacggaaattggaccgccagtatcttcgactttcataccacgacgaagaccatcggtagattccatggcgatcgttcttaagacaccatcaccaagctcaagtgtaacttcaaggacaatgctttcatcctctgacttaattacacgcaaggcattgttaatatcaggtaaattcttatcaattgggaatttaacatcgacaactgggccgattacttgaacgatttcaccttcactcaaaacatctacctccttttctttattactctaaggcatttgcaccactgataatttcagtaatttcagtagtaatttgtgcctgtctagcacgatttaattttgtagttaagtttgataccagatcattagcattatcagtcgcactctgcatggctgtcattgaactagcatgttcggcagtcttagcatccaaaatagcaccgtaaatagtagaacgtgcatattgtggtaacaacttcattaacacttgatttggatctggttcaatatcgtattctaattctttatgtgcttcagcttctttgacaccaatatctaaatcgacgattggtaacattttttcaacacgaaaagcagatgataatgagttaacgtggtgagtataacatacgtaaagctggtcatagacaccattcaaaaacatcttaattgcggttgaaacaattggtaatgcttcatcaaaagttggtacatctgaaacaccattcttttcataaacaacgttaatattgttctttttaaagaattgtgccgcaaccgaacctacagcaagaactttgatatcgtgtccttgagcacgttcgtcctcaaagatactcatcatattcttaatgacattgctgttataagaacctacaagaccacggtcacctgaaattaccaagaaacctgttgtcttgatattcttacgtggctgaatcatatctgctgtaatccccaaaccaaagacatcagtataatcaatttgagcaacattgttcttatcaattgagacgtctttttcacgtagattatcaactacttctgagctaattaaacgagaaatagttctacgaatatggtcgttataaacggtataacctttatcacgattttcagtttggttcaactttgaagcagagaccattctcatagcttctgtaatcttaccagtttgttttactgaagcaatttttttctttaactcaagtaaagatgcaggcatattctacctcctatttctcacttggtgtaaagctctcactgaattcttcaattgctgctgacaatttcttatcatctggcaattgaccagtttcacgaattgtcttgagcaaatcagcatgactgctgtcaaagttatcaaataattcgttttggaaacgagcaatatcttcaactggaacagcgtcaagatatccgtgagtcaaagcataaagaatcacaacttgcttttcaacaggaattggatcatgaagtggttgtttcaatacttcaacggttctttgacctctattcaacttagcttgagtagcttgatcaagatcactaccaaattgagcgaaactttcaagttcacggtaagctgcaaggtcagtacgcaaagtaccagcaaccttcttcattgccttgatctgggcgttaccaccaacacgagaaactgagttaccagcatcaatggctggacgagtaccagcaaagaacaaatcgctttgcaagaaaatctgtccatcagtaattgaaattacgttggttggaatatatgcagaaatatccccagcttcagtttgaataattggcaaagctgttaatgaaccgccgccaagtttgtcattcaacttagcactacgttcaagcaaacgtgagtgtaagtagaagacatcacctggataagcttcacgaccaggcggacgacggagaagcaaggaaagttcacggtaagcgacggcttgtttggataggtcgtcaaatacgattaatacatccctgccattgtacataaattcctcacccatagcagtaccagcatatggtgcaatataaagcattggtgctggctcacttgggcccgcttcaacaacaatggtataatccattgcgccaaaacgctttaaagtttctacttgagttctaacggttgattccttttgaccaacagcaacgtaaatacaaattacgtcttgccccttttggttaaggatagtgtcgatggccaaactagttttaccagtcttacggtcaccgataatcaattcacgctgaccacgaccgattggaactaaggcatcgatagccttaataccagtttgaagtggttgatcaactgattgtcgatccataacccccggagccttggcttcaattggacgactcttgtcagtcttaatttcacccaaaccgtccactggttgacccaatgggttaactactctaccgattaaggcgtcaccaacaggaacttccatgattcgtccagttctttgaacacggtcaccttcacgaatattgtcaaattgacccaaaataatgatacctacatcatttgattcaaggttttgtgcaataccgtatgagccgttatcaaacttcaataactcaccagacaaaacatcgttaagtccgtgagcacgggcgataccatcaccaacataagttacaacaccaacttcgctgatgtcaagcttatcgtcgtaatgttcaagttgttgcttgatcaaggaactaatttcttccgctttaatgctcaatggtttcacctcttttaatttttatcaattatctgcgcacggatcttcttcagtttattcttaactgatccatcaatcacgcgatcttctacttgaagaaccacgccgcctaaaatacttggatcaactttattctctagacgcaccacgtttaggttatatttcttagcaaaactttcacctaaacgtttgagttgatcatcatctagcttaacagccgtagttgcaacgccagatgcgaccttcttttcattatcataaagtaagacaaagcgatcaataatatcgatcaaatcagcaaaacgatcatatttaagtaacaaattcaaaaagttttgaacctcatctaaaaaatctttttcaattgcagtcaaaagatcctttttatctttattacttaaaataggatcgctcaagacactaatgatttgtggattggcttcagcagccttttttaattccaccatttcattataaacagtgtctaatgcatcattgtcttgcgcataaccaaatagtgcggcaccgtagcgtgctgcaatttcttctctacttaaagccattaatcatccaaccccttaataaattggtcgactaaatctttttggtctttagcagataaattcttagcaattactttttcagcgattgctacagaaatatcagcaacttgatcgcgtgcagaattcaaagcgtctgcttttgcctgatcggcatcttcattagcctttttgcgaattgctgcagcatcttcgtttgcatttgctacgatttctttacttgtgttttgcgcgttactcttagcgtcagagagaatttgtgttgcttcttgtcttgagttcttcaaggcagcttcacgctcattagcaagcgtttcagctttctttcgttcactagcagctgaatccaagtcatcaataactttttgccgccgcttttccatcatatctgatactggtccccaagcaaagtgcttaataagaagcatcaagatggcaaaacagatcaaataccagatagcattacctaagtaaatatgtgaggctgcaaataatgtttgaatagtcatttactgcccttctctctttaatactattcctttaaacagaaaattatctctttttattaaaggaacaaaatcaagaaggcaacaacgatagccaaaataggaacggcttcgatcaaaccaacaccaataaacattgttgctctcaagttacctgcactttcaggttgacgagccataccttcaagagtctttgaaataactttaccgttacccaatgatgcagccaaagctgctaaaccagctgcaatggatgcagcaagatatttaaaagcttctgacataaatttatacctccaaaaatttattctgtagtaaccttcttaccaatgtaaaccattgataaagttacaaaaacatatgcctggatagagccaatgaagacagagaaaccttgccaaatcatggctaatggagctgccaaaactaacgtaaatggtccaccagcatgtgctagatcattaccaattaaagttagcaaaacttcaccagcataaatattcccatatagacgtaatgataaggttaaaaagttggtaaactcttcaattaaattaattggaagcataaaaccaactggttgcgtatagctcttcaaatatccgccaacaccaaatcgttgtacgccgaatgtgaacgatagaagcaaggtcatcattgcaaacgacattgtcgctactggatcagcagttggtgatttaataaacatccaatcatcaactttgacttccatgaacatccctaattggttcataaaccaaataaacaggaataaaacaaatgcatatagtgataggtgattttgagcatccttgtcgctaacattatctttaacaatgccgttagtgaaatcaagtaaatactcgaacacattttgtctcttattgggtttcatttcaacttttcttgaaagccaaatgcagataaataaaactgctaaagccattagcgttgaaccgataataccagaaagttcaaaattcaagcccatgaatttaaaaacaaatgatttctccattacttcgtgacctcccttctcgtgctgaataaaactcgaacacgtaaatcatcttaacaccaaaaaaggtctttgtgtaaaatgaaagcgcattagagaaaatatttttctaaaaaggacgattacttagtaccaaatagtctgtcaccagcatcacccaaacctgggaaaatataaccattatccatcaatttgtcatcttcagcagctgcataaatgtcaacgtcaggatttgcttcttgaactgccttaataccttctggagcagctaccaaaacagcaagcttaatttccttaacaccacgcttcttcaatgcagcaatggcatcattagctgagccaccagttgcaagcattggatcaacgactaaacattcacgttcagcaatatcctttggagccttgaagaaatattcatgtggcttcaaagtcttttcgtcacggtacatcccgataacggcaatcttagctgaaggaaccatttcaaggacaccattaagcatccccataccggcacgtaaaattggcacaattgtcaacttcttaccagcaatttccttttggacagtcttacccattggtgtttcaatttcaacatcttcaagtggcaaatctctagtgatttcataggtcattaacccaccaatttcaccaacaatgcgacggaattcatttgaccccgtatccttgcgacgaataatagtcaacttgtgttgaatcaatgggtgatccaaaactacgaactttcccatatatgcctcctataaaaaataatatgatcattaaatattttaatcaaaaacgcaaagggtttaaagccctttgcgttttattttttatttattgaaatgatgtccacctgcagctttattcaatcgattcatgtaagctaaactttcttcaccttcatgaaatccttgtacataaatagtttcgatatcatcttgatcatcgaaatagcgcaagccaccaaataagttatggtcggcatcaactaaattgttgcccagatcaaatttatttgcttgaggtaaattaattttagctaagactggcgctaaagctgctacaccaattttttcattaaaatcaatttttgcaaaatcagcaggatcatcaaccacgactaccggctcacttggagcataatgacggtatttcattcctggtgccttaggtatatctttgtctgacactttgcccgtgttaattaaaactttttcacctaaaacttcgcttaactcttctggagtaatttcaccaggacgaagaacgattggtgtttctaccgataagtcgataattgtcgattctaatcccacacgagtagggccatcatcaataattccggcaatcttcccttttaaatcatggtaaacgtgctctgcagtagtaggactaggcttagttgaggtattagccgatggtcctacaattggataacccaatttagcaattaaatcatgagtcaattgatcatcaggacaacgaaatgctacagtatcaagtcccccagtaactgcatctggcagagttcctggtttaacaaacaatagcaatgtcaaaggacctggccagaaatgtttaattaatttcttagctctttctggaacttctttagcatacttagccatcatttcttcgtcagaaacagtaacgatcaatgggttatcacttggacgtcccttagcagcataaacgcccttcacagacttttctttggttgcaattgcacctagaccatagactgtctcagttggaaaagcaaccaattcacccttagctaacaacttaactgcatcattgatttgatcttttttaaaaatcttcgtttccatcattcttatttttgccaccttccatgaaccatgcgtggcttgccggccatatcttttctaaattcgatttcaaaatcaggcaattctttagcaaacaattccttcagttgttcttcttcgctaaaaccaaattctaagaaaaattctccatggctattcaaatgctcacgcacttgcttagcaaattttttatagaagtctagaccatctttgccagcaaaaagagcttctttaggttcattttgcaagacattttcatccattacattcttttcgcttgtcttaatatacggcggattagagatgatcttatcaaattcttctaagcccaacagcacgttggctttacgagtagttacatcaagatcataagttaaaaagttttcctcacttgttcttaaggcagtatccgttacatcactagcatataaagttaaatctgtaatgccttttttctgtgcttctttagctaaagccacggtaatacagccagaaccggtacccaagtcaaggacttgatcacctgatttaagtgtctgcaatgcccattcaaccaattcttcagtttcaaaacgaggaatcaagacaccgcgttgcaccataattttatagcccaaaaaccaagcataacccaaaatatactgtggagatatgcccttagccaatttttcgatatctttattggcctgcttaatctggtcagcagttaagtccatttcttgcttcagttcaaattcacttggtgtcaagcctaagcgctctgctagaacataatcaacatcctcaggacgcgcattttcagcactctcacccgctttaatacgcatctgctttaaagtcattttaggcattttgatcagccaactcctctaattgcttagtttggttgtaaagaattaatgcatcaataatttcatcaagttcaccgttcatcacacgatcaagcttgttaatggttaagccgatgcggtgatctgttacacgattttgtggatagttatatgttctaattctttcggaacgatcaccagtaccaactgcattctttctcttagcatcgtactgagcttgattttgactttcataatagtcataaacacgtgatttcaaaatttgcattgccttttcacggttctgttgttgactacgttgatcctgcattgcaactacaatcccggttggcaagtgagtcattctaacggcactagaggtcttgttaatgtgctgaccaccggcaccacttgaacggtaaacatcaacacgaatatccttaggatcaatatcaatgtctacttgctcatattcaggcataacagcaacagtggcagttgaagtatgaacacgtccttgagattcagttactggaatccgttgaacacggtgtgcaccattttcatactttaatttcgaataaaccttgtcaccagtaatcatgattgccacacgtttatagccgccaacctcagtaggttctgaatcaatcattgaaaccttccagttttgacgttcagcatatttttcatacattctaagcaaatcgccagcaaacaaagaagcttcgtcaccaccggcagcaccacggatttccatgataatatctttatcatcgttaggatccttaggcaacatcaaaatcttgatttgatcttcaagctcgggaatttctttctcaatttcagaattttcttccttagccatttcaattaaatcaggatcagtttcactggagataatttctttattatcttcaatctcttttttgtcctctttgtacttcttatatttttgtactacttcacgcaaatcggcttcttccttagaaatctccatgtagcgcttagtatcattaataacttcaggatcggccatcatttcctgaagttcttcatagtgagctactagaccctctaattgagccataactttatccataaactaaaaatcctctctatctttcaacacctgggtgaaagtaatgatagcgacaaacaggataataactttcatcgccaccaatttgtacttgttcaccctcataaacaggcttgccattgttaattcttaaattcattgttgccttgtgtccacaataatgacaaatggtcttcatctcttctattttatcagcaaaaatcaataaattttcactaccttcaaatagatgattttgaaaatcgttttttaagccaaaggtcattactggaatattgaacacatccacaattttagcgcattctaagacatgatgtctcttcaaaaattgtgcctcatcaattaacacacaagctagtttaccatcaccatcagcaacatctgctttgttcatctttttaatataatcaaatagattcatatcagcagtaattggaattgcttctcggtgaagtccaattctagaagcaatcgttcctacaccgctacgattatccaagccactggtcattagggcaatcttgcgcccctgtgcttcataattgtgagctactttcaagatctcaattgttttgccactgctcattgcaccataacgaaaaaataattgcgccatgctggccctcccttttaacaaaaagtcttcgccttaatagtatagaggaaaaaataaatttgtgtaggtattaaacctcgttttcatcctcgctctatgctaaacttagacatagttttaaagtgagggatgtacatgagttttaaatcaggaattgctaaagttgccggtaaatcaagctattggtttttgcataatgcccttaagggcggcaccagttttccaggcaaattagcaatgaaaattgatccagaagttttaaattctttagccaaaggctatgaaactgttattgtcacgggaactaatggtaagacaatgactactgctttgattgttgaagctttaaagaaaaagtatggtgatgtgttaactaatccatctggttccaacatgcaacaaggaatcgtgaccgcttttttggctcacaagcacaagagagttaaaagaaaaatcgctgttctagaagttgatgaagcaaatgttaaaatggtgaccaaattacttcatcctagcgtctttgtattaaccaacattttccgtgatcagatggaccgttatggtgaaatctataccacttatgacaagatcgttaatggtattaaattagcacctgacgctacaattatcgctaacggagatgcaagcattttttcatcagttgaattgcctaataagaaaattttttatggctttaaacttcctgatgacaaacctgaaaacgacttcaaggctccagtcaataccgatggtgttctttgtccaaaatgcgaccacattttacattatcatgaacgtatttatgccaacttaggtgacttcttctgtcctaactgtggctaccaccgtcctgatttaacttttacagttaacaagattattgatcaaacacctaatagctcaacgttccaaatgggcaacaagcaatattccattaatattggtggtacttataacatttataatgccttagccgcctattctgttgcacgccacttgggattaactgaagctgaagttgctcaagcttttgcagaaaataaacggatctttggtcgtcaagaattaattcactatggcgataaggatatcgatttaattctagttaaaaacccagttggtttggatgaagtcttgcacatgcttaatacagaaaaagatgattattcactagttgccttgcttaatgccaaccacgctgatggaattgatacttcttggatttgggatgctgattttgaaggattagacaaagaaaagattaaaaagatcctcgtcggtggtcaacgctggcatgatatgggctttagacttgaaattgctggctttgatccaggacaaatgagtactaatccagatgatgatagcctaattgaagaaattaaaaaactgccaactaagaaggtctatattctttcaacttatactgcaatgcttgcacttagaaagaagatggccgaaaagaaaatcattaaggctggtatgtaaatagaaaggattcccgcgggaatccttttttgtgtacaaaaaaggctgtagctctaatgctacagcctttctaattattgggatattggggctcgaacccaaacatccaggaaccagaatcctgtgccttaccaatttggctatatcccagtaaatcacccgtacgagaattgaactcataactccaccttgagagggtagcgtcttaaccatttgaccaacgggcgaatcaacatttataattatgcttttttcttctatgcttgtcaagtaattttaactataataatgctaatggatggtgaaacatgatcgactttaataaaacacagcatttaattgaatcaatggtttttgaacgcgttgttccaggcgtcaattacacttttatcaaaaataagcaaatttttacatcaactactggttttgctagtatctacccagaagttactcagctgagcccttttgcagaatacgacctagctagtttgactaaggttttagcaacagaaaatgtcttgcttaagctttatgaccaaggcaaacttaactttaccgagcccttgcagcaattcgttcctgaatttaaagacccgcgtgtacgcctttatcacttgctaacccatactagtggcattcgtggctggatcccccaccgcgacaaactagatcatgatgccttactacaagcaattatcaatctgccagtaactgacgaatttgaacacaagatgcggtatgccgatacaaactttatcttacttggattagttattaaaaagatttttggtaaacctgtccaagaagtagtcacagagcaagtcctcaatcaaatgccgcttgaaaatactactttttcaccacaaaaagatgattgcgtgcctactgccctagttgatggccatgtcttgcaaggtattccacatgatcctaaagctagacaacttggaatagattgcggttctgctggcttattttccaatcttcaagacttagttaccttcgcccaaggttatttaggactaaaggatattttaccttatagtcaaaagactgtcagccagctatttgataataaaaatccccaaggcataaaaccacgctcttggggatgggaccttcggtttgatccaaagcaaaattatccgatcattttgcacacgggttttactggtactttaattattcttgatcgcatcaaacgctctggtctaattttattgaccaatcgagttcatccgactggacacaacactgttttcttagctatgcgcgaaaaaattatccgtagttttatcaacgaaaacgccaaaatataatttatagaaaaaagacggctgtgtgtcagtcgtctttttatctctcactaaatttcatcatccgtctagtattataacttattttaacgctaatgtactagtcaaatattatttttctgctttaaacattttccagtagctaattaaaatgattaatgccattaataaagtaaaataaaaggccgcctgactaccttgagctgtcgctagtgcgtaggacgttgcaccttttttctgccagatcgacataattgctgctaagatagttgttcctacagaaccggctaattgctggctagtctgacaaactgcggttgcatcggcgcgcaatgctcctttttccacctttaaagcttcagctagcgtgttagaaaatgacattctgtgtcctaacatcatgatgccataaataataatgatcatcatcacagtcaaatttaagccccaaatagcaaataacaagcagctgatcgccattaagaagccacctaaataaagtggcaatttagctccttttttatcatataggctaccaaaatatggattgagtagccctgcaataatactacctgatagtaaaatcaaaccaccaactaaagatgtttgctttccgacaatttggatgtagttaggcaatacaaaactgataccaatattattaaattgcaataaaaagtaagctaacgcaccataaacaaacgctttttgcttaaatacggctagatctaacaatttcttggatgattttttagataatctaacaaataaccaaattaaaattgcagtcacaattaataaaatccacattaaaggattagcaaatccattactaatttgatttacgcctaatgtcaaagtaataaatgctatagctaaaacgataaatgatagccaatcaaaactatttttagtttgttcatgatacttaccgactacaaatagcccggcaacaaaaacaatgatcgcaaaaattgtaacaaaaccaaaaatccagcgccagttaagataaaaagtagtgataccgccaaatgctggtcccaaagtcggtgccatagctactactaagccggcgattcccatgtaaacgccccatttttcgcgaggcataacttcggttactaagttaaacatcaacggtgtacttaatcctgcacctagagctgaaatcagccgacctaacaataaaataggaaaattaggtgctacagcactaattacgcttccaatcataaaaccaacgcaagcaacaataaacaattgccgcgcagtaaaacgttcattcaaatatgaagaacaaatcataataatcgcaatcgccaataaatatcctgttgtcgtccattgaattatatccaaaccgacaccaaattgcttcatcatcgtaggaaaagtgacgtttaaactagtttccgtcaaaattccgacaaatgacataaacgcagctgataatactgctaaaacatttttagtattctctttcacacaaaaatcctttccacaaaaaaagaaagagcaaaaaacctttgtttcctattctttctttaattagcacagctaattatattaatacgcatactatcaaatatgctgagtatatctaatattaaagacgcttagctaaatcgtcgtgtaagttttcgtaacctggcttgttaagtaaaccaaacatgttacgcttgtaagcttcaacacctggttggttgaatgggttaataccgttcaagtaacctgaaatagcaattgctaattcgaagaagtaaatcatgtaacctaaagtatgtgcactttggtctggaatgttaacagtcataactggaacaccaccatcggtgtgagccaaaacaacaccttcataagcacgatcgtttacgtagttcaagctcttaccttccaagaagttaagttggtcaaggttcttttcatcgcctgggatcttaacatcatgacgtggattttcaacacggataacagtttcaaataaattacgtaaaccttcttggatgtattgaccaagtgagtgaaggtcagtagtgaagttagcgcttgatgggtaaatacctttttgatccttaccttctgattcacccattaattgcttgcaccattcaccgaacattcttaaacttggttcatagttttcaacaatttcagtagtgtaacccttacggtaaaggatgttacgaagtgctgcgtattggtatggagttgcctttgacaaatcagtatcagtgtagtcagcacgtgcgtctgcagcacccttcatcaattcgtcaatgtcagcacctgaagcagcgattggaagtaaaccaacagctgaaagaacactgtaacgaccaccaacatcatcaggaactacaaattcttcgtaaccttctgcatcagcttcagtctttaaagcacccttttgacggtcagtagttgcgtaaattctcttagcagcttcttccttaccatacttcttgattaacttgtccttgaagattctgaaggctactgatggttcagtagtagtacctgacttagaaattacgttaacactgaagtccttgtcgcctaaccattcaatcaagtcataaaggtatgagcctgaaagtgagttaccacagaagacaacagttggcataccgttcttttccttgccatagaaattgctgttcaagaattcaattgcagcttgggcaccaaggtaagaaccaccgataccaatacaaatcaaaacttctgaatctgattgaatcttcttggctgccttcttaatgcgggcaaattcatccttgtcatagtcaactggcaaattaagccaaccacggaaatcgttacctgcaccagttccatcgcgaagttcagtgttagcagcgttaaccatagcttgcatttcgcttaattcattttcatgaacaaattgtgttagtttactactatcaaatttaattaaactcataaatctgcttcctaactaaataaaatatttttcacaaacctattttaacaatcttgatttataaataccagtacattataagcgcattcaggcttttttgacaattttaaaaatcacataaccccaaattgctccacaagtattgaagaaaacatcatcaatatcgctaacccccgtcaccagcaaaaactgcagagtctcaattcccactgaaaacagcatccccatcagtaccgtccttaaaaacgttgctctttttgaaaaaacaatggggaaaaaaatgccaaacggcacaaagcacaagacattgccaaaagaattataaaagaaatccaaatgactgggagcatagactaatttccaagtttccttcatgaataccaagttaatatcactcaatggcctagagaaattaaaatcaagctgccacggaaagtaggtatttctaaaagttgtcagcatcaaaactaagattatgtaaaaagaaaagacccaaacgctagcttcagacctaattgatcttctgcggcgcaccaaaagaagccaaattaagcgcaatacagcaaaaattaaaaaataaaatattgttttatccagcgctaataaggttaatttaactaatgcaaagtggttaatattagttgcatactgtttagctaaaaaactataaagtgggcccaaaaatagcatactttgcctctttccaaaatattcattatagattatacctattttcacggctggaaaatcttaaaaaaaagataactcttagcaaattattgttttaaaagaggtgaaccattaaaattaaaagatgttaaaggagcattatatggaaaaaaagaaaattatcagttttattcaaacacgaacgggctttttaacccttttagttgtttgtttctggctgaaatatatttttgcagcttattttgatttcaatttaggcttgagcgacccgtatcaacatttcattatgtggctcagccccgtagggtccgccatcattttaatcagcttcggtttttatattcctaaaccgctgatctcttacatcacaatgttaattttagactttgccaatacggcattgctttttgcaaatattatctactatcgtcaattttcggactttttaacaattaaaacgatgtctaacgttggtaaagtttcgcagggtctaggtaaaagtaccgttgcccttctgcatccaacagatattattatctggattgatttgatcgttattgttactttactgatcattcataaaatcaaaattgatcaaagatcttacggcttatccaccccatttgcgattacctcagtaggcgcatttgtcctaactcttaacatttttttggcagaaacctctcgtccgcgcttattgcgcaacacttttgatcgctcctatgtcgttaaataccttggtattgacacctttactgcttatgattgcttcaagagtgcgcaaaatgttcaagtcactaaaaatgccaacgctgcggacttgaaccagattttaacttttaccaaaaaacaaaatgctgctccatcttcctcatattttggtattgagaaaaaacgcaatgtgattatcatccacttagaaagtttccagcaatttttaattaatcttaaggttaatggcaaagaagtgacgccgttcctaaattcactttatcaaaataaacatacgctcagttttaacaacttctaccaccaagttggtctaggtagaaccagtgacgcggaaaacatgctagaaactagtacttacggtattcccgacggatctttattcacttctttaggttcggaaaacacctttcaagctgcaccgcaaattttgcgtcaagatggctatacttccgctgtctttcacggcaacgtcggtagtttttggaatcgaaatgatgtttataaaaatatgggctataattatttctttgataaaaattactatagctcccaaagtaaagatgcaagcggctatgggttaaaagataagctgctttttgccgaaagcgttaaatatttagagcagatgcagcagcctttctatgctaagttcattacggtaaccaaccacattccgtttaacttagataaagaagacaaggaccctaactttaagactacaaacactgccgaccaaactatcaacaattactttgaaactgcccactacctagatgaggcattgcgtgaatttttccactacttaaagtcttctggtctttacaaaaactcaatggtagtcatttatggtgatcactatgggttaagtaattctgaaaatgaaaccttagcaccaattattggtgaaagctctgacacgtggaatacttacaataatgttcaaatgcagcgtgttccattcatgattcatgccaataatttgaaaggaaaaattaatcatgaaattgctggtgaaattgatgtcttgccaacactgatgcatttgctcggtattaacaataaaaactatgtccaattcggtagcgacatgctttcgcctaaaagacaaaattggatcgtctttcgtaatgggaccattgtcagctccagatatatcatagttggtgctaaaggaatcaaaggtaccgtttatgaccgagttagcggtaaacaaatcattaattttactcctcaagagaaaaaagaaatctctgagctagcacaaaaggccaaggcatcattagactattctgacttattaaacaaccacaatttgttacgcttctacaccccaactggctttgtccctgctgatccaacccaatttgattattccgtcaattatcaaaaaatgatcgctatcagaaatgaattagctggcaattccacctcgctttatagcagacatcgcggtacaactactaatctttaccgtactgatgccgctgaactaaaagatagaaaacaagaaattacccaagttcctgacagcgttaaaaatattaaagagaatacgaaaaacaaaaatagttcagaaaataccaataactaaaaagaacgcacagacctttcaaaaaaactgtgcgttcttttttagtttttagctacaaactgttcatagcccttgtcataaaaggtcacggtgaatgtggaacctttacctggtgcggaaaatacttctactttgccaccatgttgcttaatcaaagaagaaacaatcgcaagtcccaagcctgattcgccagttcccattcgagcacgcgatggatcagccttgaaaaagcgttcaaaaatatacttagtctgattcttgctcatgccaataccattatccttaaccgataattgtgttccatgctctatccgtttacccgaaataataattttgccatcatgagtgaattgaatcgcattttgaactaagttaaccattacctgggtaaaacggtcacgatctgcataaataggcaactgatcaggtgcctctacaaccagctcatcgttggctttagttgcattttgttttaattgcgacttcaaatcatgcagaataattgtggcattaaagttagtcttaaccagcataatttgattatttcgaatcttttcatagtccaaattttcattgactaaccgaattaatcgtttagtttcgcgctgcattaacgcgattgacttcggtttagaatcctctgggatagcatcgtattgcaagccctctagaatgccattaattgttgtcaatggcgtccgcatttcatgagcagcatcagccatgaattggtctcgtcgctcttcttgagccttaacctcttcgttcgactgcttcaaagcctgcaccattttattgaaattctcagccaattgatcaatttcatcgctatctttatgctcaatttgcacattaaagttacctgatgcaactttttgcgtagcacgtgataatcgcttaattcgtttagttgaataataagaaataataaagctcagcaacaatccaaccgctacagtaattaacaatgcacgcaacaaattgcgtttagccattaaaatcggtcgctcaacatgctttactctcgatcctatccaaacaatgccaacaagatttttgccattcatccatggaaccaaaacccccgtgtaggcatccttagttgaactaatcggtgaattttcattatgattattttgaattctaatctcttgcccattttttaaagtagtaaaaacttcttgtgaaagctgaattctagcctttgttttgggataaatctgctcatttttatcattaaaaatacgtaaatgagcatcatcaccacgaagaacatattctaattgattcaagaagttattgctaagcaatgcagtcccattttggctatcagcttccgccaagtttcccaaagaattagcatagctttccatccgctggtagttttgcgtataagcttgattacgcgcataaccaatctctgagtaaccaataatcgagatagttgtcacaataatgagtaagaaactcaacatattttggtaaattaatttcattatttgacctgcgaatcatcaaacttgtaaccgacgccccaaacagtttggatcaccttggcaccaaccttctctaatttctgtcgaagctttttaatatgagcatcaacagttctttcttcaccataatactcatagccccaaactagttctagtaattggtcacgagaaaagacttgtttaggcttttgtgccattgtatacagcaaatcaaattcttttggtgtcaaacccattaccggctgattatcaaataaaacttctcgtctattttttgaaatcttcaaatgatcggtcgtaatctcatagtcttgattatcttcttgagtatgagctggttcttcttccatcatcacgcggcgatgcaaagccttaatgcgggcaatcaaagcaattgggctaaatggcttagtgacatactcatcagctccgatacctagccccaacacttgatctgattcactgccacgagcagtaagcataataattggcactgtcggcgaaattgcccgtacctctttagctacttgaatcccatctttttttggcaaattcaaatctaacgtaatcagatcatacttatccgcgttctttttaaacatatcgacggcttcgacaccatcaacagcaatgtcttgttgccaaccttcttttttgaaaaacattcccatcatttcagctacggaagtgtcatcttcgaccattaatattctcaaactcattatcaatccctaaatccttttgttctcttatgcttcacttgatcaggatcgacatagtcatgtggcaattcatgtcgtttagacaaaaatgttttcaaacttttttcggtataaacaattggcaataagataaataaataaaatgttaacagccaaatgagaaaatagcgatcccaattcaaatagtgaatgattactcctaacagtgcttgaataaacccaaacaggatacaataccagcttgcccgtttctgagcaaacttaaaactatcctggttaacttgcgcaagataagataaatagccataaattcggttgggccttttggctggcgtaatcagccaaatcaaccctaccgccaccataactaagccacaagcgacatagatcacgatttctcactcctaattctgataaatttaaacggttattcctcacctggtgcagacataactattctcattttaccagtgaaagtgaaattcttcatctcatttggaataattaaattagttcccatcttcaaatcatatgacttgccatcagcttctaattttccttcgcctttgataacggaaactaacaggtatggatgatcctttaagccggtcttccaagtaccatcaaggtcaatttgccacaaataaaagtgtggtgaaagtggtggttcaaccaatgtcttaatttctgcatcttgatcttggctagtcttaacatctaacttaggatcaacatggggaacagtggtcacatcaattgacttttgagtatgaagctcacgctttttaccatccttgcccacacgatcgtagtcatacaagcggtaagttacatcacttgactgttgagtttcaattactaagcatcccttagttaaagcatgaattgtacctgctggcacatagaagaaatcgcctgctttaaccggaacttttctgagcagcttatcccattcgcctttgtggatcatatcagctaattcttcacggctttttgcatgatgaccataaataatataagcacctggatcagcttgcattacataccaagactcagtcttaccagaatcattttctactttgcgagcataatcatcatccgggtgtacttgaactgataaattatcattagcatctaggaattttaccaataatggaaattccttggccttaggattgccaaacaattccggatgcttcaagtaaacatcccgcaatgacattcccttaagtggcccatctgttacagttgacgcgtcatccttgtaacctgaaataatccaagcttctccaacttttccttctggaatatcatagtgaaaaatatcatctaatttacgtccaccccaaatttttggcctaaagtatggggttaaaaataatggttccatttaaatcacctcaattaaagtataaactttaaggcagaataaatgaaacccttttcttagatatatgtatactatttgttttacatgtaaagctacttgttatacttacgaatacctgtagctaatctttgcatcccatccttgaccatcgtcaaaggacaagctagattaattcgaataaaatcatggccatttccacgataaacactaccagctgaaataatcagcccagtttcttggcgaatgaactctgctaattcctgtgaatcagtactgatcttttgcacatcgatccacatcaaatatgtcgcattgcccgaaatgatttgtacttcaggaatgtttttttcaataaaattctgcacatacgcaaaattttgctttaactgttttttcaaagcattaagccaatcatggccttgctcataagccgcaatcgttgctggaatcgccaataaattaggctcggctacttcatcactatttaaaccgcggttaaccatattgcgcaaattttcattaggaacaattgccgtagcagaatgaagagcagcaacattaaaagttttgcttggggacactagtgaaatcacactattttgtgcttcacctgttacagaaaaggctggcgtgtaatctggaccttgtctaaccaaatcaccatggatctcatccgatagtaatgttacatggtattggtgacaaagatccgcaattttttgtacttcttcactagtccaaacttttcctactggattatgtgggttacaaaaaatcatcaaagtcgttagcggctcagctaatttttgttccaagtctgcccagttgatcgaataacttttaccatcgaaagctaaatcactcgacaaaacatggcgcccattattcaaaatggaattataaaaaatattataaactggctcttgtactaaaacattatcaccaatatgtgaaatacggcgtacaattgatgaaatagcagggactactccagtagtaaaaatcatccaatttgtttgtggccgatgattatgttctgtttcataccaatcagcgacagcattaaaataatctgcttgtgggaactcataaccaaatgcacctaatgtcaatttttgttgcattgcctcgataatttcaggtgccgtcttaaagtccatatcggcaatccacattggtaattcatcagacttcacatcccactttactgaatcagtctttgacctatctggtgcattttcaaaatcatattgcatatatctcactaatcctttggtgtttggttcgtatcagaatgaacaatttttgtacctattttcggacaatcaagctcggttttagatggatctaccttatctggatcgataatcaaagtaccaatctcaggtaccgtaattttaccagaaattgggtttttaatactatcaatctttgtattaagctccacatctaaattagaaacatattcaaaagctaaatctgtatgaatcaaggaaccattcttaatctcaagctgatcaatgtagttcaagccctgatcactttcaattttacaattaattaacgtaatgttgttagtattccaagctaaatattcaccatcaataattgaatcgtaaatagtgacattattgcaattccaaaaagcatctttagagataaaagttgaattatgaacttcaatgttttctgcaccatcaaaaacataatttcccacaacggaaacgtgatcaagataaatattctggctatctttaccaaaataatcaccattaatttgagaattggtaatcttaatatcattacaagtccacattgtttcttctgcgttagcaaaatgaacattatctaaaataatatgacttgtccttctgaataatttaggtgcctgtaaagcactatttttaattgaaatattcttggtataccaaattccagaccgtgacatagtttcaaacgtggtattttcaactttcacattttcatcataccaaagtggatatttccatttaaaaattgaattctttaatctgatatttttagcttcttttaagggagattcaccactgccaaatgtaataccatcaaggattgcatcagttaatccataaagaattctttcacctgcaaaatatttatttttgtattccataattgtttccacctttttgttaatttaataatcattaattttaggacagtattcattatatgatttctttcatgcaatgtttaatacttatttttagtgataatgcataacaaaaatgcatagcagataaacgatttagcaaaacaaaaaaccgctctagaacaacatctagaacggttatctatggagatgaggggagctatctttacttttagttacttttaattacttctaagtactgaaattaagccattttgatgtttgttggttttagttaattttgaagttggatacctttttggataccctggctaacaataaaattcagacttagaagctttgtcttagctcccaatacaaaaaagtcattctatgaaacttgattctagaatgacttttaatacaacaatacatatagtttaaatatatgttgttagaattcattgtctacaacttgccttgcaaaatcacatcattcaagaaactagaagatgagctatatccatgttcttttgcaatctctgtcaatttagttcttgcacttggcatcaaactaaaagtgtaaggtcttctcttttctcttttaacttaaacttcccacactaaataagccagtaatctcttgatcttgcttggctttaggcttctatattatttttgctagttttctttaacaatttttgcatgtatttgggtaaacgattgataaagtcagccgtgaattcagctatttgtgcttcactggcatgaaagacttgctttacgctggccagcattgcatcagtaatcaattgcaaggaatggctaaaagtaatgtccgccagctcatcaatcatgcaatagaacagctcgcctagcgtgcgttcatcttcatcgtcccgcttggcaactgacataagcatgtagcgagtaaaaactatggcaacatgagcggtcaaagcatcgtaagacaggccatgatattccgtacttagttttagataacttttgcaagttttgaaaaaaacctcaatatcccaacgcttgccgtagttgcggataatttcatcttcgctaagcgacatgtcggtacaaatgattgccagccaatccttgcgattggcacggtttctaacgcagacaatccgtgcatctattttagcaccgtctttgtcctggcgtccgactttgactgggattgacagcaggtagcgagaacggccgcatcgctttttacagctgcgataaatctgtttgatgtttttgcgttctccctcaaattcatatttgattttggagctaaccttaaccatggcaatcacatccagcttcctttgcttgagctggacgatttgatgtggatttgagaaccagctgtcaaacagcacgtacttggcttgatgacctgctttcatagcttggtcgattaaattaaccatcacgtctgtgcctttagtccgggcaagcatacgtctttggccagcaatggtgcgctgatcaaaaactttattttcgccaatcatattctgtagcttctgagaagacagcagcactgaattgattggcatgaaagaagctccatcagtccagcccagggtcatcatgcgaaaacctttcttgtaagtcattgatacatggtcaaaaacttgggcgactaattctgttttcttgaagccggtcctagagaagtaggaatcatcgacaacaaagcaatcagcccgtttttctgaagtcaaagatcgcaagtggttattaatgatttgcgcagacagaagtgtggtgaagtggagccaattgacgtgaacgttgcgcataaaacggtaatatgagttcttggaaaaattttcttgaaaatgatccattttcagctgcatatataagctgcggtcacgaaagacattgcttaaaacgtaaagaaacaagctgaacaggctaatgcctttttccttgcggaagccacattttctcaacagcttgatcacctgaaacttcttgatgaagctgatgattgagtttgaaaatagttgttcattttgttggtcaggagatggtaaaatagacattggcacaagcctttcatgcaaataaattatgttttggtcaatataattatagcaatgaaaaggacttgtgccttttatatttgtcaaaacacgcagaatcacaatgaaacaagcaattttgcgtgtgggaagtttaagttttaatataattacttgattctttagaagatatttccttaccagagtcatcattaactctaggtgtttccttcaatacttctgcaaactttttgccttgatttgggttaaaactcatagaaaaaatcccccttaatcattactgtactatacctaatttcttggtacccaaaacaacatatcctggcgcttgtttaaaagtcgtcatataagtgatcaagcaatgaacctcacgccctgtgtaattttctgttgttggatcatattcttctagcaagagtaaatcacctacttgataattacgatcattttttctaatttcaaaatttttagagttatttacttgtgcttcaaaatagctcgggaaaatttttaccctatgttctttgatctcgtatacgccactcgatgtatatactttcattagcattacctcatattttatttatacattacatatacttagtttatatttaatgtatatttgctttatacattatttgtaatgggagaccgtaaaatagtttgtgtaaggatgaatgattccttaaatttatttctttaaacattagaaaaaggagttcctttctcgtatgattggtttgaacaaaaaaacacatacagaaagaagaactccttcatgaatgattttaccaaagattttgctcaagctctattcaatccagacaaaataaatgatttattgcgcaaagagctacaacaggctgttaataacttgctagaagctgagttgactgcctttctaggctatgatccctatgccagaaatggctggaatactggcaattctagaaatggtgcttatttccgcaaggttgatacccagtttggaccaattgaagtgcaagtgcctcgagaccgcaacggtcagtttcatcagcacacgctgcctgactacaagcagcactctgatgttttggaaagcacgattatcaagctctactccaaaggcgtaactaccagagaaatcgctgacttgattgagaaaatgtatggcagtcattatagtccagctcaagtatcaaatatttccaagcagatgctccccaaggttgaggcttatcacaagcgcaagctaagcgacaagtttttctgtgtctatttggatgcgacataccttcctttgcgccgagaaacgtttgagcgtgaagcagtatatattgccattggcattaaacctaatggacataaggaagtcattgactactgcattgctcctagtgagaacattgaagtctggacagagatgcttcaaaacatgaagtccagaggcttgaagcaagttgaactctttctttctgatggtgttgttggcatgaaaacagccttggccaggacttatcctaaagctcattttcaacgctgcctggttcatgtcatgcgcaatatctgtgctaaagtccgggtggatgaccgcgaaaagatcatgaacgaattcaagcagatacatcaacagacaagcaaaaaagaagctgcagctgtcttgcacaaattctatgccagatggaataaagcttatagcaatgtcatcaaaggtttgaaggaaattgagcccgatctgctggtcttctacaattatcccaaacaaatcagagcttcaatttattcaaccaatatgattgaatcctttaacaacgtcatcaagcgtaaagctaagcctaaggcagaatttccaactgaacagtcgcttgatgcatttattggcatccaggcaatgagctacaatgaccgctatttcaaccgaattcataaaggctttggtcaggttcaggataccttagaatcttattttgaataaataattaaaaaatcaatttgcgagaaagaactatttacacaaaagatttgacaggttctattcatatgctatgtataagttatttatgtttaacttatatttatattatatatcatatttacaatatttcaacaactatcgtttttatttttataagaattcaagtgtaaaattaaaaaagataaaattgctgttttctaacaccttctattttttaagctttatttgtaccataatgacatcatttgtatgttataatgatgtcatagcgtaaaggagtgattgttatgacatcatcaactacaatccgtcttgatgacgatttaaagagaaaaatgcaaaagattttagatgctgcaggcctttcaatgaatgcatactttgtaatggcagctaaacaactggttttacaaaaaaaagttccttttgaaatcttgactgaaccagaaattcctaataaaacaaccgaaaaagcaatgcttctagctgatgccaaagatgagggcttggttacagatgattcgcctagttttactaatgtcgatgatttaatgaaatctttggatgagaactaatgtacactatcaaatacgagccacaatttaaaaaagactacaaaaagttcaaaaaagaacatccagagttaataaaagattttaagaatacagttattcagttaacccaaaaaggaaaagtcggaaaggactatgaccttcatccgttagataaacgtggtggtaattacagtggtcattttgattatcatttaagtgaaggaacggtcgatgttgtagtgatctacaagccacacaagaccaattcaataattagatttgtgagaatcggaaatcatggagacctatttgagggtaaagaaaaataaactatataaatacggatatatcagtatttttgatatatccgtattttgatatacgaattagaaatttagattttattctttttaaaactccgctcaccatgttgaaaaatcgataaaaacaatgctaaatgtagaaaaaagaaaaaatcatagtagtaagactttaaaaaggacggtagaactactttaagtactacaaattacaacaaaaattttataaacttctacttcattaagaaaaaatcctgtaatacagggctttttaagctaaaacgcaacttttacattttattaattagtgattcagtagttaaaatttctctatccttatactttacagcctcagcaatcgtcagtttttcaattgctctaatgtacttctccatgtaattaaagtctaaattttttgtattacttacaactggtaatcttacactatcacttcttattttggcttttgaaatggagtcatcccaactatattttttagataaagcttttctaacacttcctacaaaatattgttgaattagagggcttttatatcttgaatctttaaaatatagtgccaaattatgactatcattcgaacaaaaatctttttcttgataagttactaccatagtttttccaccaatgaaaacgcaattgccctcatcgatccattctttaggacaatttatgtattttaaaacagcattattgccttctgctgctgtcaagtatggcacattgccattttcaaggttagctacttgactcttcaatatactatgagtattaactacattaaatagatcaactattttaaattcttgaaatattggcttatatgctaatattttcttgtcttcatcagttagtccatagtcatttaatcctgtagcttttaaataggaatcaagctcggcgagccgttgctgttcaagctcggctatatattgttccatataattaaaatctatttcatctgcatcagttacaggtagcctcaccttagagtctctaaacacattatccacgtgtctaacaagaacagacagtaacaccttagacaatctactaaaaatggtattaaagtacaacgcaattttagtattaagtttaaatttgggaataattttccttacgaactgtcctgcataccaagaacgttctcgataaaagaaagtcatttgtaacagccccaaactaaacgtattaggttcattgtaggggacatcacatacaaagtctgttgtgctttcaatgccattattcaaagatgttcgggtaacatagtcatattcatttgtacttatattaggatttactaatttagacttgttgataccttttaccttttgtatttcaaataaatcacctaatttaaattccttatacttaaccattctgaccacctataacttgactaaccttccacgatagataatctgccacagtccttttaaagtcctcttctgcaggtgttgtgtcaatttttaaatgctggttataagtccaatcattgccttctagagtgattgtatctttaattactttatggtttcgttcagtatagtaattcgttttaggctttttatcactaacaattgcaactacttcttcataacgttctttggcatgatctgtatcacgtaaattaaccttctgaccagattttttacggttcattctagtatatccatcttcactaaaatctaagaaggttactaaatcatcttcttcatgtggtctagctactttaaatacataaatagcagtctgaacactagcttttccaccaaataaatcagttggcatatgaatagaggcaactaaagtattatttttaagaatattttttgtgtaaggcagcccgttgccactaccagcgttttcttgaataataattgccgcatagccttttgtcatttgtgacaatgcttcttgaacaaaaataaaaccttttccttctgcagagtatggaggatttagcaaaaacacatttgctggaaactgtgtgtaatttttatacagctcatgactattaccattaaccatattgctagatccatctcccattaggatcatgtttaaaacggctaaaatgtaaatattgcccagtatttctacacccagtaattgattttctttaatattttgaatcttgcactctagtttctgtttatcttgaattgtatttttagcatccttaaccataatatccattgcagacactaaaaatcctgcagatcccattgccaaatcccacacaaacgaatctttatttgtatgagctaacctagccatcatattcgttatgtatcttggtgttaaaaccacatcattttgacggtcattatcaattgatacccaatcatttagagagttcaaaattttaccagtaaaatctaaatgcaaatttgattcaagcaaaggaagtatatcattatagacttgcacatatatcttatgaatcaaactttcaccatttttaggttgccataaagcttgtttagtaaaaataggttgtaacaaagccataatcatgttaattttgctattttccgcttttcttgcatttaggaaatctgcaatatgatttaagataatttgtccatcattgtttctttcagttatatttccttttaattcagcaggctctaactgtgatactccttttgtctgtagccccgccatgattaaaccagtaaaaacatacaatttttcattagttgtcagtaggttttgaattgacttatcgtcgtacaaagcttgatgaattgattttatccttttttctaattcatcctcagtttctaatttaattttttcgagttcatggtcatttagatttagtttgtctaatatgccaaaaagggtatctatattgatttgcttaaacaaatcaaacgatgaatctagctgtctaatatgttttggaacaccagcattagccttagaaatataataagctttctgctcaggatcttttaaattgccttcagtatctaaagtagtaccattaattcccattatgataacttcatcacagtctgagttatctaagatcgcatttccataatgcagagcaccattagtagcatatgtagtaattgcactataattaggatcaccttttttatgtggattttttgcgttcggcttagaatctgaaccaaatttagtcacttgaacaatttgaccagccttgtctaatttttctaacttatttttgccacctttagcttcaatcattactggtactcttcgtgaatgattatcttctaataataattgaatatcaggataattgttgcctgcaccaccagatttagattcagcttgtcgcaaggctgatgtaatttcactatttatttctccagttttaccgtaatgcctaattcctagactatcaagttcactcttaaagtattcttctactttttcttcaattgatctaaccatttatcgcaccgccttttgttgcatgcagtgcgtaaatgttgacaaatgaattatttgcccataattgatgtgatgtgatcattttattctcctgttcaattcttgcaatggttgattgaattgtatgtaactttttagctaattctgtttggtgttattcctgcgtttcttcaattaatttatctaatacccttttttatgggcaattccactagctatatgattttactttttttattatatagcatgtcaacaatagtttgccatactaaatggtttttaggatcttaggcatttgatctttatttaaaactaaatttgtgaatcctattgaaaagccgtcagaaacaacactaagtgtagaaaaaataaaaaatcatggtaatacgcgtggtgctagttaaattgttttagttaacaaaaaaagtccaatcttgttagactcgacttgtaaacatattaatagaaaagagtctgactagattgaactaccctaagcttaagcgtttttctcatcctaacacaagttagttttagttgtttaaatataatttatcgctgtttgtacaaactttatgccccagatgcattaaagcaaagacggaatatcaatcgatgtaaaatatctgacagttctattctggccttgcttatttggcaggctttattgggcgttgaatctcaaagaagattttgtgaaaagcttgttaatttatctcactctcgctttaatcgcagagcacgcatgcttttgccattgatctatttaattcgacatggccttaatgaggaagtagatctgtcaggcgacattttgattattgatagctttcctgtgccagtctgtcagccaattcgcaatcgtcgagccaagatctttcgcggctatgccgatattagctataaggcaaccaaaaaaatctattattatggttttaaggttcacgctattgttagcgacgacggctacttgctagattatatcgtaaccaaggcctcagttcatgatgctaaggaaacagtagaactgattactaacgctcatcctgacaatcgttaccttttgggcgatgaaggatatttgggcaaaaacctgcatcaacgcttagagcaaatgggctatacgctttggacaccatatcgtaaaaacatgaagaatgctcaaaagcacaataagcactatttaatggcactcagaaggaccatcgagagtgatttttcgcttttgtcttactacaacgctgaaaataatcgagctagaagtttagcagattttcaagagagactcgaagttgccattttagcttataatatggcatattgtctagaacgatttaactagcaccacgcgtattatataagtttatttagatacgcttagcatggtcttgtgaatgagcattgttttgaccataatatgcattctcaccatgcttacgataatagtgcttatcaagcaagtattgtggtaaatgactattagcgtgggttaattctaatgtatggaagtcctcttctgctacgacttctaacacttttgcattatatactgccttagcaggtgtttctccccaggtaaatggtccgtgctgggaaactaaggtgcctggagttgcttcataatctaaatgacgctcttcaaaagtctttacgatagtaacacctgtattaccttcataatcttcttcaatttgttccttagttaaggcatctgcagcaggtatatcggtatagaaagtatctgcatgggttgtgttcattgctggaatatccattttagctgcggcaaaagatacagcccaaggtgaatgggtatggacaataccaccaattttagggaaatgattatacagatacgtatgagttggggtatctgaagatggatttcttgttccctccactacttcacccttcaagttaacaactaccatatcgtcaggagttaattcttcatatggaacacctgatgtcttaatgacaaatagacccttttcacgatcaattccagatacgttaccccaagtaaaggttactagtcctaacttaggcaattgcatattggcttcataaacttctttttttaaatcttctaacatgattgaaccactttctatctcactgaactgagttttttattagtttatacattttatctgtatcagtttcgcttaaaatctgatcatataatctacgattagtaataatgttaattaactgtgttagtgccttatcatgctcatggtgaaagccaggaacaagtacaatgacacactttattttttcttctatattattaacggaaattttaataggtctttttagaattccaatttcaatttccatttttcttgtatgcttagatggtgctgcgtgcgctaagaatgtatcagatgaaagcaacatatatgggccatatttatcaattaaactcaagatatcatcacaataaccagaggtaactatattctttttttctaactcttcagatagctccttaataataggattcaaatccgttccattcattagattgtcaatgatttttatactacttctattcagaagatccatcaaattgtgtttatttttatcacgtttaacagtatcttttgtaggatatagataattatctaaatcttttcttagattagaaatattctttatttgagcatttctttgaataatgctaatcaaattatctaaagtcttttctctattaatgaataactgagggaaatagtatcttaattgattctcaacttttacatgatcctcactgtccatcattgccttaacttggactacaggtaaatcaatattttttgtatttaatggagaggttgtaatgattaatttagctgtattagggatgcgtaaaattttatttaattcatcgatacttagtgacttagaaaatgtgattaatggatattgtttgtgcaaattagaataaagaatagcagatgaacttacgccactagtacatactaagagaacttccgattgcaagctatctctaatattatcgtttctatctaaaacatgagatatattatctgatagatcatcgtatgaaatgaagtacagactgatcaaagcaatttcattaattgaaataggtttagaaaacagcttagctaatggactacaagataattgtacaaacttaaccatttctgggaatttatggacaacatcagataaagcttcagaattaaagtcaaaattaaacttacttctaaaataactggcatataagtgattacttaaggctattacaaactttggagattgaatttttatgcctgaaatagaagcgtatctattaacaatgtcttgcgctacatctaaaattttgtctttaaaagattctgtaacgtaattaactgcgtcggcttgcgagcaaagaattaattcactaaaaaataaaatttcacttttaattccaatcccatatctttgcgtaaagtctgtaactgcagataaaacattaactgtactctcttgaatatcattatctgttatatctatgtcaacaatcatatttcccatagaaattcgccatattctaaatttaagaattctctttaatttagaaatagcgttttcggtaaatcgtgaggaaatatcttcctcgagaatttctatatcactttttacttttgaatcttcaataattggaaatggtaacttatctattttgtgtgctattaatccactattatgtttttgcagctcattgaaaataaaacgacttttctcttcttcagaactttttagtagatgaccatttgagtcaatatttagctttagttcagaataattttgtcgaatgtccttcaaatcatttattatcgtatttctagaaacatccatatcatcgattaattgattaatagttattggactattctgaataaaaaatttccagataatttccttcaatctgttttgtttattttcgttatgttgaaggttcttattttcattgatgttttgttgcttccaagcacttatagcttgtgcattgagtatatagcctaaatttctaacattttttataggggtaatatcttttgatgttaataaagcattagccttttttatccgataaaagattgttcgttgtgagacatcgaaatagttacataattcatctaacgtcacatatcttttttgctcagcaaaataattaattaaattgcgggtgtcaattgattccatctattatccatatcctaaaaaaatcgttaagacaatatctaaaatacttgccttaacgatttctaactctttaaactaacctttgataatttcttctacttgatcaataacgtcatctacgccaattcctgtcaataatggcaagccatttaaaactggaatcttgatttcatcattgtcatattgagtagtagtaatagcagcatctgcttcatctgccattgattgtacttgttgtacacttgtttgaactaatttgtaatcagtaccttcgttaaagcctctatcagttagctcttcgtttaacttattcatggctgctgtactagtaacaacaccagcgccacatgcgacaataatctttttcataattaaatcctcctaactttattaagcttttttagctgcttcagcttctttttcagccttaataatgcagtgacggttccacattactaagataccacaaactacaataccaataacataggcaagccacttattgtgtgccatttggaacaatatccatgggaaaggattagattcatagtcaattgatccaattaatgttgagttctttggaatagcaaagtgagcagctctagcagccttagtaaagaatggtgataagttagtaccaatccacaaaccaatgattacgttaattgcaccaataataaaggaacggaagaagtcgccgtgtgttactgccacaatcaatgggaacatgaagacaaatccaacaagtccaatggttggtaagaatttattgcctggtaaaatgaaggcaaataccaaagataatggaatcattaaggtagcacaagccaatacaactggactaccgatacctactgcagtatccataccgatgtagaattttctaccaccaaagcgtttttgagtcaatttttgaatattattagatactggtacaacaccttgtaataataatgcagccattttgggggtgataatcataacggctgacatagttacacccattaacaaaatcttacctattttgtctggccaatccatacccggaacaaagccatatgctaagaatccaactaacaaaccaattacgaaacctaaaagtgtaggttcaccccagttaccaaacttcttgttaaagtctttagcatccaagtgaatcttgttaacaccagggatcttatcaataatccaattaattactacggcaaatggtacaaaagaacctgcatatccatgaggaattgagattcctggtaatcctaagtacttttcagacaaaggtgcagttctgtcggcaattaccatgattacgaccatgtttacacttgctaagaaaagactaagcaaaatgtcatcagtcaaggcatatactaatgaacctgtaaaagcaaagtgccaaaagtcccaaatatcaatatcaatggttgatgttgttttggtaaacagcataatcatgttgataatgatacccaatggaatcattgtaacacctacaattgaaccatatgcaattgcagatgctgaaggccaaccaacatcaataactgacaaattgatatgcatgactttaatgatttcttgaactgctggattcataacatcagttaatattgtaacagttgcatttaatcctataaagccgattccgaccattaagccgcctcgaagtgctttagcaaaaggtaccttcaaacataacccaaaaatcaaaaagataattggaatcattactgttggtcccaagttgactatatactggataaaatcaactacatatttcatttaattccactcccttttagttaaagtacgatgctaatgcatcatataattcttttgaatctttatattccacaagctttgacattagttcttgttcttggaacatttccataagcttttgcaatagttgcacttgactatgtggttctttcatagctagcattgctacaaatctaacttcaacatcttttgatttatcagccatatttttgaaaaacactggctttttcaatgtagcaaatgcaataactggcttattcacatacttaacatcagtatgtgggattgctacgccaccttcaccgcttggcaaacctgttggaaaaatctcttctcgatctaaaacagcttgcttatagctttcagtcacaaaaccttgcttgaataactgatcagctaatgtagaaatagcatcggtagaatcactaacatctaattgtgcaaatactaaaccatcttttacaaaactcaatcttatttcacttcccacttcattcatcacattcatagtaaaataaaaccgcttttataaatagttcaattagccaaataaataactgcaagttctgcaccccttttgcatgcataacttgcagttttattgctcttgtgaaatttgtactattctattacacatttgcctttgcagttttaatggtaaattacaaaatctataaccattaattctgaatgctcctgtaaattaattaattcgaaattattatgaataaaatcagaaattgcaataatattgtccgcacctgttattatttcttccttttttattagctatttcaactaaatcaatctttaatatttcgccattaagcaggtatcgttcgactattttagattgatctactaaattacacattttgaaccagctaagatgatttatttcaaaatggccaataatatatgcatttacagccatttctattgaaaatacgtctttaatcattttgaagccttcttttaaatctatgccgtttatttgctaaatcttcttgcattgccaagattattacttgtcatagattaagtttttctttttgtagaaagtcattacatgctttaatagcagcaagaacaaaattagtcatttttcctccagagattttgttacctacaggctgataatctatttcaccagtctcatacaataaaatacgcgtggtgctagttaaattgttttagttaacaaaaaaagtccaatcttgttagactcgacttgtaaacatattaatagaaaagagtctaactagattgaactaccctaagcttaagcgtttttctcatcctaacacaagttaattttagtcgtttgaatacaatttgccgtttgatatacaaactttatgctcaaaattcattgaaacatcggcgaaacattgatcaatgcaaaatatctgatagttccattttggctttgcttatctggcaagctaccctaggcattgaatctcaaagaagattctgtgagcacttttctagtctgtctcactctcgctttaatcgtagagcacgcatgcttttgccattaatttatcaaatccgtcatgctcttaatgaagaagttgatttatcagatcgcattttaattatcgatagttttccagtaccattctgtcagccagttcgtaatcatcgtgcgaagatttttcgtggctatgccgaaaagctactaaacaaatctactattatggttttaaggttcacgctattgttagcggtgatggctacctgctagattatgtggtaaccaaggcttcaattcatgatgcaaaagaaacaatagaattaattgccaatgctcgacctaaaaaccattatcttttagctgatgaaggctatttaggtaaagaactgcatcaacaattgatgcagatgggatacttactttggacaccttatcgaaagaatatgaaaaatgctcgaaagcacaataaccaatatttaatggcactcagaagaacgattgagagcgacttttcgttattatcttactacaactctgagaacaaccgagcaagaagcttagcaggttttcaagaaagacttgaagttgcgattttggcttacaatattgcatattgcctagaacgatttaactagcaccacgcgtatggtaatatatgaaagtacaaaagaagaaacatcttgcatatgcgagaaaattaagacacacaaaaatcgctactctaagtccacaaatgagtaacgatttttttgtttcaccaaagtttaaaacaaaaaagctatatgcattggctaaggatagtgacgcttgtgatgttttcttgagttttgcttatggattttacgcctatggctattttgagcaaaaatcaacttttacattttattaattctaattgctaatatacttacttaatcttgacgcaatgcacctttaaccaatctgcagcaaaatacatattctcttctgaatcctcactattagtaatatataaaataaactttaatgcatcgtctttatcagcttttaagtgatatccattttcttgtaaaaaaaacgccgctgcataataggaagtccgtttatttccatcagcgaagatatgctttttagtaatcttctgtaagataaaagccgcttttaaccataatgttggatataattcacgtccaaataatatttgttgtggctgtttaacaacaacgtctaacccctctggatactgcacacctacagtacctttaccagctttttcaagcaaccgttgattcaaatggattaaatctgttttggttaaatagatcatttattctctaactctcgtgttaattctttattttcttcataaaattgatcaataaagttgtccaaattgggattaattgaatcaactattttaaacgtgatcttcttaccattaggatcatattctttttcaagaactgttccatcttctacatgaaacttagttaaatcttgcttggttaaacgtacactcaatgaattaccagctttaaaaactttagttgtatcttgtaacattttaatcacctgctttgccatttaattgttataacgcaataatacgatgttataacgtgaatgtcaatattttaactttttttattatatagcatgtcaacaatagtttgccatactaaatggtttttaggatcttaggcattgggtctatatttaaaactaaatttgtgaatcctattggaaagtcggcagaaagggcactaagtctagaaaaaataaaaaatcatggtaatatgaaggtacaaaagaagaaacatcttgcatatgcgaaaaaattaagacacacaaaaatcgctactctaagtccacaaatgagtaacgattttttgtttcaccaaagtttagagcaaatatgtttaatgctttagctgtatgttatcacgaaatcaagtggctatcataatattgtctaaagtcctcggtactgaaagcacctgaagttatttgtacaatttcattaagcgctttttgctcactgcattttcgatatatcattagacgctttgttctaatcctaagcgaatgaagcatccattttatattctcatccaccagcttataatggctttcaattaaaagagcttttgcggctttttcatactcgtctttcttcatatactttctcctataaactgcttatcaagaacacggctaaattattgccaaggtgacttacgtaagagaaggtcaaatccttagtttcaagataaactaaagctaagacagacccacatagtgagtacaaaatggtatataaatcaatttgtggttcatgtaaaagtccaaaaattaatccattaatgagaacagcaataaacaatgttgattttttgcctggtttactaaaaaaccaattgaaaaaaatacctctaaaaataatttcttcaaaaagtggtccaattgcaatcagcattatattaataattggattcaactgttgctgatgtgcagctatgtttgcttgattagtggcttcccctttaatcaaaaatcctgctaaaatttgcaaaatacaaattactaaaaatccaagaaaagctaaactccaattttttaaagtaaatcttggcattctagttttattgtaactagtaaagtgccaatcattcacctgattaagtcttctttggtaaattccgtaggtcaagctcagtaatgcaaccgttaatccaaatataaatataacggcaacccagcttaattgtttggctctaatcataaataatccttgaactaccgcataaataaggaaagttactatcatttgaccaataccaattgatttatcaagaatcttttttttcatcttttagttcctttgatttttttatgtctgattttagataccctatcgacaagagaaaaatataaattattactgaaataccaaagccgaccgtcgcaaaattaatattggaatttaaatgcttcgtagaaaccttgcaaattgattgcgccaaagcacctgcgttagcagaaacaaaaaatgcaaacatagttgcaataaacagtgctgttcgtcttagaaaggacaaaatcatatttattttcataaactacctctacttagcaaatttatcatcaaaaccaaaatattttctaccattgtatttcttattgggattaggcttaatctccattcgataggtacctttacgaccattgaaagttacaatttgcttttttcccgccgcaatttttttaatctcttcaggggtccaacgatgacctcgatatgttttcttaaaatgatattctttaccgtctttatatgtaatcactacatagacatttgtatctacaggtttaggattaactctaaagccccagaacctgattttacgtctaccttctttcaattcttgttctatcaattttccagtagccgtaaagctttttccttgcttatcagtcgcttcaaaactgatttcttcacctgccaacaagctggtaatttcttcctcactaaaaacatgttgtccatattcttttttaaatttaatctctttagctaaaggcttatagattcctttaacgtgatcagtatcttcaggaaactctactttccaaccaactctggtaatctctttacccgtttttttacttttatacgtttgttcggctaaataagccgtatgttgttcttctttaccaaatttttcaatcgaataggtgatttgtttcccttctaaagcttcttgttgctccacttcagtagtcgtatgtccatcaaaaatcgtaactggtgggtttactgtttcatttgtttgagtaaagactccgctaaatcgttcaattgcttttaaatcaccagctaattttttaacttgtgtatcttgctttaataatggggcattttctatcataactgctttatcatgttcaattgtcttttctgcaactgagtagaccatatgttgctttgtgggatcagccttaatttcattcaaaatgtcttgcaagcgttttgtaatttttcctgaagacaaataggtatctttagctaagcaagcaatcaatgcgccagttcctgttacttcaaaaacacctcttactacttttaattggggaatgacctttttattttctttaccaattgcttgtaatttactgattgtttgcattttagtcgcgccagtacccaagttccatttatccaagttattcaaaatgaaagttaaagtaggtttagttggtggcgtatttgtaccttgatatacttcagggctagcgttttgagcaaaatgtgtagccttattttctgattgcttttcttcatttaaatcattttcgttaaaaatcagcttatagtttagttccttaggaacattaatcgtactcgtaaaatcaggatggtttgcaatatgggctttaacttgagtatatacataatcctcagctaacattgctagatatgatttagcaactcgttcataaatatctcgaccacatttaccatatttgtcttcaactttttcaagtgattgtggtactaatttggtcggacgattggctccgtgatcctcactcttaattatgaattttttgcgtgggtctttatgacttaagagttttgaatcaattccaacgactgctgcaattttatctgcatatggtagtaactcgttaaaatcatcaatcgtaattgcgttgtcttctgttctcggataagaaacaatcttatcatcatacattttttgataagtctcggtaatttgttcagttgtatattccttttggaaaatcttacccaagtcagccaagttgactaacttaggcggctgggttcttttttcagttgtgctatcaataataatttgatctgttgcataatttactaaatcttgttctgctaaacttttatctgaaaaacgccagctgtctccgttttgatagtcacgcttaaacgtattgccatttacatccttatatcttatttcatagaaaggctttttaacgtatgcctttcttgctctattttgttcatcaactaagcatgtaatatacgtctgcaagcgtccaattgaaagagccttgcccttgttgctaaagccttgttctcttgccaattcagtagcaattcttgattcttctaatcctgttagaaaatcaaatctctgtcgtgattttccttttactaaaattccttgagcatcttgttcactaactgtagccttctcaggcttatgtaaggaatcaattacatagttagctgagtcatcacctttaaaacgaattcgccagacttcattttgccagtttaaataatctactatttcccaacctaatacatcaccttcaccagacgggtcattatcgcttgcaataataattacatcatgtccaggcaaattgctcttaatattatcaatgtatctttgcttggacttaataacttgctttgaccaatttaaatcgagaggattccaaggaaagttatctaaattctgccaatccgcatatttagctgcaaggttggggtcaaccatttcattaggcgcattgagttgtaataaatgtcctgcggcataaacaatatcatagggatttccttcaaattcgccactcattccacctaaataatccgcaaatttttctgcttgagactttttttcatttaaaataagtaatcttgtcacgttactattcctttctacaaaaaaagaatacctcacggtattcttcacatagcatactcattattcaaaaaaattaattaatggaggtaactatattatatatcatttttataatatttaaaagcttagtaaacctgcttaatgctttccaaaataactttattcatttgactaattatctttctaaagtagttgtacaattgttgatcattgttacaattgaggtacttagaataccaataaaagtcgattcccttattttctaatctttccttttctttttgataaatcttatcactaattacataaccataatttttaatccaatcttgattaatataagtaataaagtcgcttgcctgatcatactttagtttttttacgtcaaaaccataattaattaatttctttttgatcacaactaaattatcaattctgttaagttgagctggtttaactaaatcaatcacataataggaattaaacaaacctcgtaattccccttctttattaggtctaacaacgttgaacaatatatcttctaatcttgtgacttctttcataactgcctattatttctccttaccataatataagcatctcatttatatcatatattgaatttatagtatacgatattgcactaactaaaaaaataaggcaccagattatatattgttgcttatatattaagcataagtaacatatatactaattataaacacgcaaaaaacagccagctctaaatacaataactttaaagctggctgttttaacataaaattattttttagcggttttacgaagaaacttaactaatctatgtgtgtcttgatcacttaatctacctatataattaacattagtatcttttttagataccgaataacgtctataagtatcaatccacgaatgttttttcaaacctgtagtttcatattcttttatttcgaaataatgctttttaattttttcggatttattcttaaactttgtcgttatgtcaaagaaaaagaacttatcctcattttcttgtaatatgaatattggtcgtcttttaccacctgaaatctgaacgaagcgaacatatactgtagcaatatttttactcatcttttgacatccattcttgcagtttctcagggctatccaggtcttctgttgcccaatcttttgttaagttttgaatttctaattcatctttctctctttcagttaaattggttgaaaatggtaacccattctcagcaataagacgcttatagaacattgtgatagcaatagtaggtgttaaacctaatttttttagaacagcattgccttcttctaccacaccatcatcaatttgtacttgaattctctttttagtaattgaagccatagtagtgcacccctcatatcatttatactgatattatactactaaatcaatggaatcaacctatataagagtaatttaaaatatttactcaccacttgttcaataaattactaactgctttgcaatcctcatatcaaattttgcatttttgatattttttaacgatccaattcctgttcacctttttgaatagcaatttcttttgctttttcattggtcagcgaactgtttactgtagcaacatgtggcttgctagtttgcacttctttatcatcaagcaatttagacttttcttgatttttttcaatttcattttgtaaattgtcggttaacttgctatagttgccatctgctgtccagcactgcgttttattaaatgcatcatccaaatttctaactgtatctattgtcatacttttttcgatttttcttagtgccgtcaattcggtcttaaaattagttccattagtctcattgtcagtaacttcttgctccattttttctttttgcacataccattgcgagtgttcaggagtatctaagaagttttccttgacaatttgacccaatttttcttgttctttttcgagtaacttatcggtactattagttagtgtcttagtagctgaaccaacatgcgtcaaaatttgcccttttaccccacttggtaactcattaaacttttgtccgttgcttgtccaattagctatataatcaactgtctcttgcttaacatcaattccataatgagaacaataaagataacttgtaagctccgcttgcatctcttttaattctctaggcaggcccttttcttgtttttggctattatgtagctgtgcatgtcccaattcatgagcaagcactgatacattctccgttggagtgttgtatccatttaacacaatttcgttagtagccctgttaaagtatcccttagcattttgcggatccttatatttatcccgaatatctgcattaaatgggtcataagtaatgactggcattttcatgtcattagctacacttcttaatccattctctaaggagtcaatctgtcctggattcttcatattaaaatcttggtgtctattagggtaaagttctgggtatttttcctttggcatattggtttgtggagcatcgaatacagtgccaatcttataaaaagttttttggtaagtttctatattacccgcctcaattttttgtttttcgtctttagtggcagtctttaagttagctaattctttgttgccatccttatttttacgatagaaaactgtagctttagtaggaacaaatattttaattcctttttcacctctgttgaccttatagcccatgcttttaaactttgcaaatgatcccaccgcagtcgcacctgggcgctgcatctgaatcatcattgcatttcttgaggaatagttatgaaacttatccataaaatcaagcatttctacaactttctctggtgattgagtataattatctacttctttaagtagtccattttttaaatcctcaacggtttgagtatgtttctttttccaagctttacggtcaaaagtctttctaggtcgtctttcagactttaaagcatttttatccatatccattttatctttaacttgacctgatactaattctggttttgatttttgaaggcgatcaagatattatgactgaagtgaaatatcatcattaagactcgatatctctttatcagttaatggtgctgcccaatcagaagtaaaactagatttattccaatctacatcggctaaagttccactttctttttcactatcaataactttttgagttaggggcttaataccatttcgattaatcgtgtgccattgataatttccttcagcgcttggtgaaaaaagataatgatactctacatctgaattaaggtacttaccgtcattctttgatatatcgttaatcatcgcagataagtcatgatactgttttctaacaggatcatcgattcttggtccattagaattatattcatccataagtttagtagcagctgtaggattttctggaatatggttatcgttatagttccctgtttcaattaactttttggcatcgtctaaagtacgataattatctagtaaattttgtcctgtgaaagtaagtccaccatccatatgaaaatactgagtagtaactgaaccatttggatttaaaattgatacatttgatcgtgttgacataatttttcctttctaagaaaacaaaaaagacgcttcataatgaagtgtcctgactacatacaagttatttagtttttactactatcaccttctttctagtaattttaaatttacacgtttctgctgaagataatttactgtcttagctgagaataaaaaacgctgaagttttgataattcaatgatttcagcgttttttataccatctatttagaaactgtcaaatcttttgtgtaaatagatttttctcgtagattgattttttaatcttttatttaatcaaagtaggattctaaggtatcctgaacctgaccaaagcctttgtggattcgattgaaatagcgttcgttgtagctcattgcttgaatgccaataaaagtatcaagcgactgttcatttggaaactctgctttaggcttagctttgcgcttgatcacattgttaaatgattcaatcatgttagtcgaataaattgaagctctgatctgcttgggatagttataaaagaccagcagatctggttctatgtctttcaagcttctgataacatggctgtaaaccttgccccatttggtatagaagtcatgcaggacagctgtggcttcttctttgtttgtctgttgatgcacctgtttgaattcgttcatgatcttttcacgatcgtcgacgcgtactttagcgcagatattgcgcatgacatgaaccaaacagcgttgaaaatgagctttaggataagtcctggccaaggctgttttcatgccaacaacaccatcagaaagaaaaagctcaacttgctttaagcctcgggatttcatgttttgaagcatatctgtccagacttcaatgttctcgctaggcgcaatgcagtagtcaatgacctccttgtgcccattaggcttgatgccaatggcaatatagactgcttcacgctcaaatgtttctcggcgcaaaggaaggtatgtcgcatccaaatagacgcagaaaaacttgtcgcttagcttgcgtttgtggtaagcctcaacctttggaatcatctgcttggaaatatttgatacctgagctggactgtaatggctgccatacatcttttcaattagatcggctatttccctggtggtcacgcccttggagtaaagcttgataatcatgctttccaagatatccgagtgctgcttgtagtcaggcagcgtgtgctgatgaaacatgccgttgcggtccctaggcacctgaatttcaatctcgccaaattgtgtatcaactttacggaaataagcaccattgcgagaattaccggtattccaaccagctctatcataaggatcataacctaaaaatgcggttaattcagcttctaatagatcattaactgcttgttggagttctttacgcaataaatcgtttattttgtcttgattgaatagagcttgtgtcatatttttggtaaaatcattcatgaaggaatctcttttctagtatgtttttcgttcaaatcaatcatacgggaaaaggattcctttttctaatattcagggaaataaaattaaggaaatattcatccttacacaaactattttacagtctctctatttaagccttggtgcgattctttaatgttacctatctaattcttgattttggtagaatgatttaattcttttagtttttaggtcattaatgtcaatatctttttgcgaaatttcgttgctcaaatgatacgcaacttcgttcttgctaggtaaagtttctatcattcggtccaaagctttgtcttcttgttctctagtatctgcacgataaaatctcatgaggctaatcataaattcagcgtggtctatgttgtcaaaaggaagggttaaataatctctggtttcccaggtatctcgagcagagtttgcggcaattagcgctgttcttttatttccgtcctggaatggttgaagcttggataagcttgcaaatactctccacgcatctttagtagtctgtttagacgagttgtattgttcaattatttcatctaagtcttcggggtagacgttttctggagcaaagtatgcacctttagctgtgcctttagggtctgtgataatgacaattgcgtcgtctggattataacttgcatgtcttaagcgccctggaatacttgggtcttcttcttcgctatgggtaaaggctttattaatttcaataattccttgtcttgtaaatccgaatttctttgctgcagctatgccatctaaagcatcttttaagatggcaccatcgtggtgttgatgtacaagcttagataggtcattaagatctaaggctctttttgtttgcaacacagtactactgtagtcattcatactaccaaaagagactatgaagtttgcaaggtctaggttttcaatcatttgttctcacttactttccgtttagttagattacttacaattttagcactatttaattaataatccttgtttttggagcggcacatacgcaagcggtatgtgcttcttttttacattaaattagcagttagtttttgattagctgctctttcttattatttatctttctaatctttgatctcttcttcgcataatatgatatccatgaggtatatatttaacctgcttattcaaagtttgttctaatctcttcactttttttctcctttacactacaataaatttaattgaagaagcaattttcaaattaaggttttgaattttcaattcaggtggctcgctgccttgtcgtatggcaaaagagagcgtagtgcattgcttttcaaaaagtccttcgatgtttggagggacttttcttttacactttttcttattgaatatgtgttaaaaaaagtttaagaatagcagtagaaattaaggatcattacttgatcatgttgcccactgccttgacgatatgctagtcagaatgtctattattcattaatttatcctttcatgttacaatgtaggtaaagatcacagtgcaaattaaagagttgtatttacaacttggctgcctactaccttagcgatatgctagcttaaagaaggcgaggaatagatcagtgagactcattaaagagcggcatatacggaaagcggtatgtgcttctttttttgcattaaattagcagctagtcactgactaactgctttttctatatgcttatctttctaatccttggtctcttctcaaataagccgatcgcttttcaaattcttgtcctggtaatgttctggttgtatgcttagatttttgttttccttgttgcattttccgaaaagcttttaaggtgtcattccaatctttacctaatttttcactaggtttacagtatttaactttaggaaatttagattgaatatctttaacaaatctttttccagcttcatcattatctacacctaaacctacacttttaagaattcgaccttctttttgtaattgtgctgctgtttgtgttatatacgagtcaaacacttcttttttaaggccatccattgaaacaaacctagtatttttcattccaccctttacttttaccttagacaagtcaaagaaactaattgcatcaattggtgattcaaaaaatctaatattttctggagtttttccattcatacctggtgaatcgaatgaaaaaccatatcccttggtagaatttttttcaatcattttgagggttcctcttctaccatatttttgatgattaatttttgtaccttgttttgatactcctttaacttgtcgtctatcttgaggatcaagccacaaaaaaagtgcgttacccaatttatcttgtgcaagcactttgtctctatgtaattgatctatagtttgactcgaaattccacgttgattgtgcaagtatccccatactcgattaattttattttctgaatctatttgatttttatcaaacttgaaggattctttttggacctgataaactttgccatcacctactccactagttaacaccttatccattgcctttaggaatttctctttttcatttaaattgctacctgacaattcatacaatgtagaaaagcttaatgcaccttttccatgaacttgtcttgaattccagtaaaaagaatttttggatggtgtaattaccaatgaatcatgttctacccctttaaattcatcgctgcctgtttgacgtaaatcaattcctgcactccttgcatattcaacaatactcgctgaattagctgccttaatttgttcctttgtaaaagtaagcatttattttttctcctattctttaacgtcaaaaaagcaagtagtaaaactacttgctaatttccccacctatacccgactaactatatagtcacaaattaagatgattctattctaattctcgttcaacttcattttgcaatttctcaaattcacgtaagttcttcttggtttcaatatccgcatttgtcttttcaaatactttttcttggttagatttaatttttcgtatttgactttgactgataaaaggcttttttaagtaaatatgtccttttagattttttctacgcttaataatatgtgaatgaagtgtatagtcgtcatttgattttatcttattattttgtattgttgtatccttacgaatttctttcaatgcggattgaatatattcgtttggatcaactttatctttaaaattaatcctatgtctttgattatggttagcttgcttatcaatttttcttaaatcagctagcaatgcgttaccatttcttgcataaattccttctttgccatatagttggttaattgcataattcttattttcacgtttacttttaccatataagtcttgtcggtcatcttgcattttccaaactaagtctttatatttttgaaaatcggagttatattttagcaattcatcaaccaaatgatccgacatctttttttgatttttatctaacttgttgtaaaaccattctcttcttgactcaggcaatgctctaacaaattgatttatctctgcttgaaaagttggctgttcaacttgactagtcaaattaacctgaattgcttctctaatagcttgacgtctctgagataattctttagtcatctctgaagaaccaatcaactcattagcaaaaccacttttcatatgatcaattattttttgtggtcgcctacccttaggttgactaatcccttcacggtttataatttttcttcttgggtctttctcaactgttgcaatgtgaatatgaacattatcagtatttctatgaatggaagccacccagtacatctcatttaatggtggatccatttccttttgaaaaatactctgcatttttttagttgccttttgtagttcttcctcatttaatattccagttgtactagataaaatccccttcttttttaaaaaactattatcaaaactaacaacatcttgccacaagacagaattattctcttgtccttcatttaattgctcacgaatataatctaaatctttcaactgaacaatatctttgtcagagctaaatactccatctaaaactttttctttggttggatgaatttcactcagcttacttgcagcttgccctattctttccaattcagtttgttctttggtatttagtcccgtttcgttctttttctgatttaatgcatcaattcgtaccatatacccaagatacttatcaaattccttatcattcaaatcaaaaaaatttctcttttccattaacttttcagcagctgcttctcgttcagaatgttcttcactttttactctagtaaagttgttttcctgatttaattttcttacttgttttttaactcgacttaattcatctttttcttctgcagttaaaaattctttttcttctaatgcttcttttctggctatatatccaacgtaacgtccaaaagcttttcgtgaactcggcacagaaaattttgaagttaaaattatagctggtcgtcccaaaaattacctcctacaaataaaaattctatgaagcaagttgattaattattttgctctttcaattttaaaagccgtagaatcgcaatctcagcatcaaaacttactcaagttgtccgccattttcctccattctattattaattctttcttttacttttctctttgcagatttataaacttctgcatcaattccatttccgacaatttgcattccttgagtcatcaaaaactcacttaccatttctgttagaattgcaacttgttctttggtaaatcgctgttgttttctaatatcacttaaatcttttgtccacttagaatttttttcattttcttctgctaacttcataagatgatgaattacttcagcattattttttaaatcgtgttcctctttataatcttgaatccaatctaaatctgtatcagaaattgtcgctctaaaagttgtcttaatcattttttctggtcctcttaatcagcgtaagtttcttgtctttttttcaaagcattatcaatcttttgattaattttttgtaactcttccagttctttttctttttgaacacctaacatggcattgaagaataagaacttataaagttgaccattattatcaaagcaatgttcttttctaatctgcctaatttcttcccattgcttatcgttgagtcgaaattgcaaaaagtgctgtcgtcccatttcttgccctctttctaaatttaatcatcttcttttgccgtgtcttctgacaaactatctaacaaatttaatgctcgttcggtgtcattaacatctccactaatgaaatactttgcaagaacattcagccctaataaattttcctgcagaagtttattctgcttctgaatcaataaactagtttgcgaatcttcattttgattttgaaaattaattggaatttgttcaatttgttctctcaaaaattgatttctggaaattttcttacttgaattttgatttaattgattaacaatccgatcaattctagccaagttttgttcgctgattccacggattaaaacttttaccataatttttctttcctctgatttctagtttctagttttccttctagtttctactctgaaatttgactaaaatctgcttcttttagttatctctagtaaagagcataagggaaatctgaccccacgccttttatcaaggtgtgctgggcttggttgtaccaagcgatttcgcatttttagaagtgatatcacttctgattaatttgacgtctatatacttctaaattgttcgtcttttacctgacattacgtcttgatacgtaatgtttttttgtaatatccgaacaggacgtattcttacgtagctcattacgtccaagacgtaacattttttagctaaattttgcacctaattatcaaaatcaccgtccttaatgtctctgattgtgtcttcatatttagaaattgcttgctgactttgtgtgatagctgctttgttttctgaaatatcattttccaaactactaatttgtgtttggtaattttctttttgactatcaccaactttttctaactttgcctttgcagaatctaaattattttgagaattttgaatcgtagcttgagcatccttaattgtattttgttcttgactaatcttctttttattccaattaatcagatattgacgataatcaaggatatagttttgatagctcttagttactttgcttgaagtcagatcaaccttattctctttaatgaagaactcaatataattattttcagagaaatcttgcatgttaactcgcttattaactttttgtggtagaatatcaatctttaaatctccaaagccatttttgattccgctaacctcaattactaaaaagtgattattgattttctgtgatttgatcgcaagctcttctccatcttctccgccacgtgacatgtttactactcttatagcatactttaagttgcttaagtctgaatcgtcactagtagatgttacgtctgtagagtccccaagataatactctagcaacatcttttcgctttgcttattgtaaatagaatttgctaggtaaaatgatgaattgcctgtcactacattaacagtttgctcagtgtcaattgattttcctgtccaatagggactagcaacgattgcaataaaaattgcagccaccactccaatgaatgataaataaattttgcgatacttatgtttttggtgtcgcttcaattcatttttgtttttgctttgaatcattttttgcctttctaattgtcatccgaatgtacacgatagtttttgctatcatttaattcctgttttaattcagtaatctgctcctgttgatctcgaatttgtctttgactttctgaatctggattatcacgattaaagtaaactgttgccattagttgtgctgctgataacaaaaacaaaactaaggcaactaatttcaaacgatgatttgatttttttagtttagttttttctgattgatatacaattcgactagacatttttaatcacctcttatgacctgatctatcttttctatgttagttcccgtatatttttctacttgttttccatactttaaatggataaaagttggtaccttagttaacttatactccgtaatatagtgtcggttttgtggttgattagtatttacaaactgtatattctttctaaataaatcttttttcattacagcgtatgaaaaaatagaacgacagcttttgcagtcatctcgataaaataaaactgttgagtcatcattagttttgattttaacgatgtttttttgatttagttcatgattaacatgttgattaaaaccaataactcctatgaacaacaaaaaaatcattgcacaactaactgcaatgatttttaccttagtttcttttttcggttgcatcttaatctgcctcacgatcaatttgatagcgaccaaaatacttaattgaagtaatttgattagtcgctgtatcataaatcagctggtaagcatcagttggtgttcccaaagttctatcatcttttgtcatttcaaaataaactttggcatatacaggcacttggttattttctaaaatacctgtcttcaaatctagttcatcaatctgacctgtcatatctgccccactatattggagctctaattgcttatcatttttaaacatagaattgttctttaagactttttcacttactaaatgtgtatctttcaccttgtctggtatttttaatttttcatcaccactatcatacgtgtaaagcagttttagcagtttacttacctgtttcttggcttttgtctgtgctacatcctgctcagctagtttctctttgctgcctccttccttcatagcaatatgcttttgcgaatttccaattttagcatctacattttttaactcatcttgctttttagccaactcagttcttgcctgaccaacatgatagtcgatagctttttgcttgttagtctcataattgattacgcctaattcgagcatgattccgaggattgctccacctaaaagatattttttattcatcttagttcctctctatgttgatttctttaaagctatttattctttgggtcttaagattataatcaaagtcccaaccataagtaacttcttttttattggcactttcgactagggttactactgtaatcttagtatgacttacatctgttaagtcaccaaagtaaaccgttgtactcttgtttcttaaataaccataagaatctccattatttttgatgaagtttttgccctctttacctggaaaaatttttgtccaagcactaaattcttctttttgtttagctgacgaaaattttcttttagtatagatagctggtatcacttttagaaacttgtcacgtgcctcttcttctgcactcaccacatcaaacttttgtttatatgcagaattctttgtttgactattttgctcttgaactatttgcttctcaacagttttaatttctgccctaatatcattcagttcatcatttttaggaactctggcaattgcaaacattcccagaacagcgaataatactccagctgtcatcatccatactttcagattggactctcgctcctttttctgctgcttcatctttatccttctttcttggcattaataccaggtatgtttcatccagaatttttgtgcattacgccatgaaccatatctgccttttacatatttatttgctacccttgtttgattcttatgactgtaatcaccattaagatattctctctttaattgataacgtccataaacacttgggttagctgggttaactgcgtcccatctacctccagattctctctgaacaatccagtcacgtgcttcagattcagtttttgataagccatcatcttcttcagattctgcatcattgttcaaaccatctttaattaatttaattgggtctttccaagtaccatcatctttgtacgcagagagctctgcggtagcaaaatctttttcagttgcaccaatgtgaacgtgagtaataccatgtgcattacttgctaagtgacctattttatctcctactgaaactttgtcgcctacctctaccttgacgtatttcaaatctgcttcatcaaagccgaattcctgataaatgacattccaaccgtcggagccttctacccaaacgtacattcctagaccatcttgagtatgtccttgaaatgcaattttcttaacggttccaccatgaattgccaaaatatcttgtccaccatatggaacagtaccaaagtcaacaccatcatgaaagccacctgttcttgtagatgacttaccaaataattgctcacctgagattgtattacctggtccttttttaggaattgacttgaatggccacccccatttgccgcttattggcttacaatcttcctcagctgaattatctgagccactagacccatcacctttagctagtgatttattgcctttcaaggcatcatattttttagcttgagcttccatacctgcttggtaatcactttcagctgcggtatagtatcctgcttttttcattgcatgagcatattgagcaactgtagcatcttttcctaatccagcttttttaaaaccattctgaaccgtcacagcccactcggtcgcaaaatcacttaagttcttgtagtgaacgtaattaccaccttcactaccacggctttcacctttggtaccgatagtgcttccttctgaataagtcataccaccaaagttatgatcatgtttagcaactgaactatcaccattacctgtttcctgtcccatttgagcaaaaagtaatctagcactaatcccagttttctcatgcacagcatccgctatatgcatcatagcggtctgtccatacttaggtgattcaatgacactaattcgtccttctactactcctccttgttctcctcctgtatcacattcatcatctgtagcagctcccattgctgcaattaaaattacaataaaatatataactgataaaacagctaaaattcctaataaaaaagcggctaatccagcccatcttttcgtctgtcttaaccgcttaatatttgttatcattattgaccacctgcaaaaatttcaagttgtcgttcagatggtttcatcttgacctgatatctttctcttcctcccatcgtgacaattgcttgtcctgtctgcaagtcaggaatattactgtaatctgaactatttaatgcttcgcctaataggcttttgattttcttaagttgagatggatccatactcattagccatttgtattggcaaagctcgaataccacttttaaacttgatagctgagctgattctaccgaatcgggaaccatttcctctggtgattgtgtagcaaatataatacctgcattaaactttctcatttctcgttcgaagtttttaacataatcaaccgcaaaaatattttcataatttatgatgttatgacattcatccaggaacacatcaaaatactgtacatcttgacgtgtgattttccctgcctttaacagagcattctgttttctaccatttatcaatgcatgactccaaattaaacttagagccatatacaattgtgcctgataaacattttgattcattgttgaaatagcagaagaatcaaatagtagaagcttagtatctgtcaaatctctcattgtagaataaccatcaaataattgaccgtaattctcaatcattgattccaatgctaccttgattttttcataagttcttattctttcagcagtaaattgatgttgttgatagtacattggcgtagccaatttttttagccaatttaaaaactgactaaaagtcgggtatttttcactatctaaattagtaatttttatatttcctttattttgttgaaaatttctaggtaataatcccatgtctacataaaatccacgtaacaatgaatcaaattcttgcatttcaatatttacaaaggatcccttattaatcatttggaatagaatatctaccttagaaatatgttggtaaaaacttgctagctcatcaaccttacctgtattttcatctacagtagttgccattacttcaaggggattaatcataccttctgatccatccaagctaaccacggttccaccataatgcttaattaaaggaatatattccttagtcttatcaattccacgaaagtacatatttctagcaattgtaccttcaaccaacatcttcattaaagttgatttaccagcacccatcttacccaagatcatcatattaaacgatcttctgatattagttgatctaaattgatcaaaataaaaggctcccccagttgaagtacgacctaaccagactcctctagggtcctttaagctttgagctgaaaatgggtcaccagctccaaccgttaaggctggaattggttgttctggcaatgctgctaaatccttttcttgctctgtgattggtaatgccattgatttaaactgtttatcttgcataaacatataaacagcaacattataaccttcaccccgaagtttgccacgaagattagacaccgattgatctaatgcttcaatggttggagcataaacaaaaattctagttagcatcaatttaggaatttcaccgccttggcttaattccaatgcatacttttctagtgattgcatatccttttgtgcatttaatgcatcagtagcttttctcgcattaacttgtctatcagctaattcttcaattgacctgttcagttgtcgcttaatttcataaccagaatcagtttttacatcaattgtagttaacgttgaatcattcaatgccacttgagtcatccaaagtaataatggatcgttaggataatgaattaccgataaacaagccgcatatccatcactagcaattgcataattgtctgcaaaagtaatcccgccttgtggctggacttctgctaaaaatttggtattataaccatttttttgtagttctctttgcttttttaaactagtaacctgtcttggatttaactttacagttacttttttctttttatgtttcttcgctttcaataaactagaaattcgcattttttctcccttacttactattcaaattattttctctaaagagtaccttaactgtttccttatagttcaatggtctcaagcccattaacccttgatcagcaaattgagcggttctagtgttaactctaatatcgtgcaaatcttctccaaaaatcataatgtaaaactgcacatctgagtaatcttctgtatttcttgacagcattactgattgcaacaacatttcattaactaatcgtaaacgcattttttcatatctggttttgggtgaacgaatcccattctttaaatggcgaaaatactgttgttgttcactagtatcaattctcgtcgacatgactacaattttataatcgttgctataaatccgattaaatgtagtaaatgaatctaggtatttacttctggtttcatcatcaagtgaatataaatctgtcgaatgtacacgcaaatagcgtgcttgggtgccatctactaaatcaagtatcccgtcttttgagcagtttctatagcccaagtattcaactattgattgatctcttgcatcttgtcttgatcctttatctaagccaaaagctctaaacaagctaggagctttgctcctactgtttctactttttctttttgttcgcattattttctccttctaaaaataatggataatatctgctttggtcttgtcgcataatgcttaacaaaacacgataatttctaatctttggcgctagaggggttcgcattactagcagaattcctactacaactccaaaacctgtcattactaattgccaagtcggttgtaaattaaatagaaaagaaatttgttgtcctgccatacccccaatgaaaagagcaaaaacatcaaacatatctaggaaaaagatttggatagatacattagttgacttaggaatcattattttttgatatttatccatgcactaatcctttcttctgctatctccatgacctaatttgccaatgttggtagaacttggtgatttagtttcagtagagttttcaacttgctgattgattgtggtcttatcatgcttaatttcagtcaccgtgttagtattgccttgagtttcaacggttctattagtgtttgaaggtacgctgctcttcatagcatccttcacactactcattccttgattgcctacatcatgagtagatacttcagttctgccagcctttctttcaatatctacatggttggtaccagcagtttcagttactttactatgactgtcttgtcccttaaagtctgaaacattgcttaagtgtctaccgccttcaccaactggttttggcggtgtggtttgttgatttgaacggtgttgacttgctaacttactagtggatttttgagtatctctcaagcttggtaattcatcgaccgcattactacttgttggtgagcttgaagagctatttgcttcaccacgctttgaacctgaaccagtaactgaagcactgttagttctaggatcatttgctgtttcttttttaccagtctttgaaccattcgttgcttcaccaactgtggtatttggaatttttgcatcattaccagttgtcttagctccacctgttgacttaatagagccgtcagttgaactttccttagcagcatttgatttaggcttgctatcatcggtcttaatgccttggttttgaatattatcaggtttaactgatgtattcttaccttggtcatttacatttttagctgaatcaacattgcttgttgccactgtttctttcttgccatcatagtttggatttcctacaaatgaagtatcacgtccaatacctgttggttctgcactgccaccattcttttcagctctgttttgcatgtatggattatgatgtaaagtgttgtactgattatcagttaaaccaccatttctcatcattctagcggcttcatcttgtacagtttcagatacagcaccagaatttactgccctgttccaatcaactgcactgccaccattctgcttaaagtcgttatgagctgaacgaaaggctcttcttgcataactgccagcttgttttgcttcactattgcttgctccattttctttagcaatagccttagtagagctaccagcttgccaagcttgagcttcaccaatcgctgcccctgctaacttaccagaacctctggcaactccaacagcgccttcagctaaatttttacctttaccagcaatatattcagttgctgcaattcctccagcaactttactccagccttgcttaagtccagtatccaaaccaaagaatttttgaaccttgcttgaaccttcccaaagtgcccaagttaaagcaatcattccaactgcatatagataaggattatcatgaatctttcctgcatctgatgaactcatccacacagctacaattctatagaacgctaattcaaagccttggaatgcaattaacaacgctgaactaaaaatatcttgtaccgcagctttagtacgctttccagtttccaaatcagtggagaaaataatgattgataatacttgcataattgccaattccaagaatgctcttactgaaacaaagcaaactagtaagaaggcaactgtcattgaaaataaggcaactacaactgggaagaattgtactgaatatcgttcatacccaccgttaaaaattttgaaaaaggcagtattgctttgacttactttggttgcataatatcctgaatatgcttttccctttacatttgatttcgtaccaacgcctgtaggagctaatttataacgcaaattgtcagggtcccatgctggtttttccttagacttatttgctttattacttaatttctcagctaaatcagctgaaatagtagttgataaatcgcctgatgttgcagtatcaaaatcagacttgttcatagcaaatgaaccatagtgaacatctttttgtctctggtctttaatttcaccatttttatctttagaaacaccttcccatttggtattagtatccccattattgattttgaagccactaaaattattagctatgattgctaataggtcattagaattggcttgtactacctgatatggcaagcttgacgtccctttatcattatcagcctgtacaaagcctttatatacacctgtagactgatcaaccacccaatttgtaattggctgaatatttccgattaagaacgctgaaattgctaattgccaaacgacattttttaattgaggagctttacttgaggtaccaattttaattccgacccaagttaaggttaaaatcatcaaccctgcagcaattcccattaccccattaattaaattagtgtttaaacctgtggattttaagattcctgagaaatccaaactatctgttgctagttcacttgcccaattggcaaatccataaaagatcttaactataccccattttgtctgattcaaaatacgtcccaaaaaatcatcataatgtaaataaggtgccgcattttgtagagcttcagttactttttgtaatttggctggatcataatcacctgaattggttgatttttgccaccaatctaccaaactactaaaaatatcaagatactcaggattaatgaaactagttaaatagaataaccaatttgtcattaatttttcctttctttaaacaaaaagataagtagtcattatcgctacttatcttgataatattcattaaagctttggctaaattcctgtgttaactcattcttttccttgttcttatcttctaattttttatctttatagatgatattaacaaaagctattgaacttggtttttgtccttcaggcacatcttttaattttgtagcctcgttcaatattgcttgttttgttccatcactaatatcaccatcatgttccgttaaccagttcgtgataaatggtggaatctgattttcttcttcctttaaagacttcttcatttcttgttcttccttagcatctttagcagctgcttgaacatttgcgtcactttgacgatattggttatatgcctgcaaagccaaattttcttcttctacaaatacatttccatcttcatcttgtttggtaacttgttcagtccaagttaaccatttgctccaatcgatttctaatgcttttaaattaatattggcatgtgcatcaatcttttcaactaaatctggattagttttaggattaaagtcatcagttaagaatgtatgtgcaaacggcattaatgtttttcctgtgttaaaaataggatgtgaaactaccgcccagccccatttattcattcttgttaaaggtctcaaaactagtctttcaccgccagctaaatgttctaatcgttctggtagtatcaacggcactttatctacgctaacactaacatttttggctaaaccattttgatctttagaaatattgcttgtctcaatcgttttattgccacaagcttctgaaaattctttgttagtagctgaatcagtagacataatcaaacatttattctgacaattttctttaataacttgtccgtcttctttgccatacttactgtagagctgggcataagactggataactaaagtaaatagaatattacgacctgctgaaactgtcataatccgatccatattctgcagcggaatcatactaccaaactcatcaaaaatacattgtactcgtctaattgtacttccaccttgaaccagccgacactgacgtgataattctgtatataattgattaacaaaaattgtagctagcaagttgtttgaagcatctgaatctggaattttcataaagactgcaattggcttatcactataatgcatcttaaagttttccatcttaatttcaggttttcctacctgacttacttcaacctttttaactttaggattaatctttaacttaaaagtattcttcaaacgcttatgtcctgtaatagcttcaatttcaacaaagcttcctgtttttagattgacatcaaagttgttttcaacaaatcctttttgactaacacgaatctcattcgttttcagttttttattatgattatctctaaaattgattttaattaactcaccatatagtcgttgatcaagcaattgaaactccaaatattttggaaaaccaattgatttcatttctagtgtgttcatactggtcatgcgtgagtttttcggtaaagtgaaaatatctagtttctgtacaacagttgaaaaaattgagcctcttgccttatcacctgagaaatttgtggaaccgaattcttttttagcaatagatccctgttccaaatgcttaaagtattcacttaaaacgttgtgttgagtatatggatctgatggattagtataatctatctgtcctaactgattaactaaatcagcgatatttacaaaagtaatatattctggatgggcttttttatctctaaagtttttaggattcatgcaatactcaatcaaagcaataatcaaaccattaacagctgattgtgcgccgtcattaacccacttgttttgacctgcttgtttatcaaaataaagcgagtaggtaattgagttaactaattgcattgctccttcaacatcaccctgctcccaacttctaataattaactgtagcggattaaatgcaattcctttgtttgggtcatctaaatttaattcataaacatcatagccacgcttcctcaacgtatttacagaagcaacatacagttctcctttaggatcattcacgactagtgacgattgtttttcagccctacttactaggtcgatttgttctaatatagtagtttcacctttaccagaccgtgaagtaccaacaatcaaattatgaactgtacttgtatcaatgaaataatagccatgtttagtaataaatggaaattttttggttaatcctaatctattaatgtgagcaatggggaacccaccaaaacctttaaagctaggctttttaggatctaaccctggttgactatgatcaggaacttttacataggtgtcttctaattccttaactgtagtaaaacgggcatttcccttttgcccatgagcgactttttgactttcaaagtggaatttttgacttaacaatccaccaataattacgctagcagcaaatacctctaaaattgccatgggcttcaactgtgtcttaaagaaattcaagccagctaatcccgctttatctaaatcgagaccattcgtgaataagttatagtttttacttttagtttgtaacatgacattatggaatgctcctaataaccacattattactagaaagataaaaattcctataaccaacgttgttatcagcttcgtataattaaaattaatattgctagactgcttgttttcatttttgggacgatgtaattgtctttcaacttgatacaagcccttttttacaagattcttttccttgtttctagcattttttagatttattcgtgatcttctttttttagtacgcatatctagctaaccacccatcttgccaatcagcaatatcatagaaagccaatgcgacagcttttttagctgagttggaaatttctgttcgctgatcatcagttaaacttagccaaatatcccttgtctgagctttgtcttcattagcaatggcactgtacaaactagcaattggatttgaatatattgtagcaatcttctttaaatttcttgcgtcaccttgccctaataaaccatctagcatatctctcttttgtgcccaagtcttagtttcacgatattgttttaaaatagcttgtgacctagttaaataagttggagtagatttagtctttgatttagcattaggttttttatttttagcaatatcttcattagctgattttttatcagattgcttactacttgattgcttgtttttcttgacatgcgagtttgaacttgatcgttcaattgaagctttttgttcattattagaatggttattagtataagcccatgtaccacccaaagccgcagctgcaaggcaaactaatgagataatttcagatttatagtgacgtttcttaggactgttatcctcggtttctggctttaactctgaatcttcttcatttgattcagaatcaattggtgcatcatttttcttagtatcatctaagtctactacttcaccatcaacatgtggcacaggcactaaagcattctttccatcattatttaaagtaatttttacgttaggattttctaaattattttgagtaattgctgcagcaatcgcttttgcaaattcctcaggcaactttgccatattttcttgttgcaattttgctaaagactcattctgctcaattgctttttgctttaaatcaagttcacgttctttgcgagcagcttctgcttctcgctgacgcttttcctcagccttttcttgatcaagttgcttttgttgatttatttgttctttagctaatcgaactttttcttgaaccttctttaaattgtcttcaaataaatcattattcttgtcatagttatttctaactgcatgatcaaaatcattactaatggttgttctactatcatctaactcagaatttcgtttttgtacttcttcatcacgcgcaacacgttctactttagctttatcagactttaattgctcatcaatttgttcattagcattacgagttttaagttcttcttgatcattaaaattttttagagctaaatttcgtttctcctctaattgcttcttatactcagctaatgctgcttcatcattagttttcaattctaatgccttattttcttttaacttgctcaagtcagactgattattttgcttctgttgagttgctttaactactagctgttggatctgtgccgctgttctgccttcaacaattttatctagtgactctttagtaaccctgttatatgcttcctttaatctatctacaattgcagcctttgatttcgctaaaccttcatcatatacacgttgaatatcttgcattgaataatctcttaacgcctgatcgattttatcattcaacgcttgatcatattgatctttaggattatccaaatagcctaaatcatgacgaatattatttagagcaaattgatttttatcatatcctcttggcaaacggtcaagaatatcattggcatcggtatatttgccatagctaattacttcactgcgactagtttctgtttcagttgtttgacctgcttgaattggtgaagcaccaaccttttcaggtaattgtgtaggaacattattcaaactaggattggctgcggcattactatttgattcttctgttggactgttatcctcagtctcatcatttacatcattttcagtaggtatttcatcacgcacttcatcatctgaatctagaatttgattactattaaacatgaacccattgtcttcatttaagtcatcttcatcatcattcaaactaggttcaagttcattaaagatttgatcctttagcgttgttactgtttcttcttgatcacgagttaaattttcattctctaaatcacgatcaatcaagtttaaaatacccccgtcttgatcctcaggtaaaatttgtgcttcaaagctgctttcttcacgatcctcatcttcatcatcaaagatagtaaatgtaacattagaatcagcttcttctaagctcttggcatagtccttaactgcatcatctgcagttttaatgtctaactcaggcgattttctacttaatttatgcttaaattgaaaatattttttcgccccttttggtaccttatcaaaggtaactaatagcataatcttctctccttctttaacgcccaccatcaacccagtaagttaaacttacttcaccttacttacaaaactaactatctagcattccaaccaaacatatttgcgaatgatggtactaaacttgcagctaaagcaacaatggcaacacctaccagtgcatacatcaataattgctttgcattttgcgacattctgttaccaaaagcgaaaagaataccagccaagataataacaacaatgaacagacctttggcgatactcttcaggttcttttcggtactaccagtagccttattaatattgctccaaacattaagtaaaactggatgttcgtttaaaaaagcctgagtaccgattaagccgctccaaaataagtaggtcaatttggtataaacagctaaaaacattgttaatcctccttgtataaaaaaagcatttagttagctaaactaaatacttttacttgtcccattaaaatcacttgtaggcttattatcatcttttgatgacgtaaccttatcatttaaagtcttatcaggttcagcaatctgcaatttttctaactgttctgataattcttttttacctgcgacttctaaaactgcatctttatatgcgcttttagtgcctgagatcaaatcttgtacaaactcaaccataattttttcttcccaagccttttgtgttaagccttgggaattatgtagcttgcgtaaaatggacttgtcttgtttgctaagaaccatttttcctccttaactattgcccaccatctcacccgaaagaaaaagaaggattagactttctcaccatttcatctaatcctttatacgttattcgtctttgttacctggtaatgtttcagtttcacgcttgttgtctttatcagtgtttttattcttgtccccatctcctgttgggtcaacatcttcactggtatagtcgcctgaaacctcgatcttcttatctgcagaagcctttggtgtctttggcgatacgtgagtaatattacttggtaagtcttcattgttgaacaagaagtgtgcttgatttggtacttcaatttgtccattatccttgttcaggtagtcaagcaatttaggagtattgattaaagtagtatcaatgaacatcttcaagtgcttaccatgccatttaccaggctcggttgctacccacgaaatcttaccagtcttattattaacgtctaatttaccttgatcagtaatttcttttgctttaccagcactatctttgtcgtcatagtcataaaccttaacgctcttaatgttttgaacgtctgcttcgatagcatccttaattgcaagagaatcaacattcacattatctggtacagtagcttctacgcggtaagtatatttcttgccaaagtctacgtctttaagtgacttagaatcacctaatccatcttctgaaacaaacttttcatccttgggattagtaaatggaatattagtagttacttggttagaatctgcactaccactatcttgaattactttagattcgttgtaaattacagcttgatctttatgttttggatctgcgtgatcctttaagctttcaccgcgctttacagttgcatcaaaggtaatcttgtaagtttcattgtagaagtcatccattgccaaagcatcagattttgcaattactgataagttattacctgaagataaagttactgtgaaattgtaagtaacatcttgatttgcacggttataaactctaattgagcctgtatcaatattcagaatattatctaaattatcagtgattctatattctgtatattttaaacgcttttcaacatctggtacagaatgtgtaatttgatagtgatattgttcatagcggttatcaagcatatcatgagttactgatttaattccaccgacttcactaggtgtatcagttccttcatccttgtcagaaacatatttattaggattcattggtttatcttttacaattggcatatcaaacaatcttaggtaagcatggttaaaagtaccattccagatactatttgaaatagaaaccttatccttatcagtcattccagcatcaggatcatatttaccttggttcaattgccaattatcagtatctgcttcaatttctgtttggttttcagctgcatgttttcctgttgtagtaccaaaaacccaatacatattaatatggtctgtgtttgacattgttgctgtatatgcagccttccaatctgaggatcttacagtacctgaaccatcaggtaaagcggtatggtgttgattggcatctgaaaagatgtaattattgcctaaagtatttttataacttaaccaagtattaccatccttttgtccatcgccccaaataacttggtcaatcttaccataagttgatgtatcatagcctacccattggttaccatcaatatcacgtacactttgatttaagttcaacttcaaaggtttacctgtatcatgatcaataaaatcaattctataagcaaccgcaccttgtccaggtgtgaaaacttcaaaatatggacttacaccaaaggcaattgttggattctttaatggaactttttcacgtttaccatcagatgtatcctgccatttgtaggattgaatattccaatctgttgcggtgattttgacatcaatagtttttccgctgttaggatcaacaccagtgtttgaataataaacaccaattttcccagctaatttttcatttcccataacagagaatgcataccaagagtgatgtttgtcttcagtattagtacttgaagtagcccaatcttgtgacgcaccaccaaaggcatggattttagttacaccctgaataatcttgggaataaaggcatatgaacctgccatttttgttccaactgcgttttgtcctttcggcaaatttaccatttctgcattatccgcatgtacaatgcctgatctagtagcaagaaatgtgcccagactaaagccagtagccattagtgcaattgcggctaagctgactactttgtttttcttcgttagagaaatcatataatttcctttcttttgagtaacaaaaaaagaagagccgtttttatttgtactcttctttatacttaattattaaattagattatttagttagcattattccaagcactaacccattctgggcttgtaccatctgcagtaaagaatgaaattcctacactactaccttctccatcccaataataatgcatgcttaatgctgcatatgcattatgctttttccaaccatataaaactcttggctcgattccttcactatttttcatcatatcaaataatttatcagcgacttgaactggtttccaacctttatgagtaaaatctccaccaattacaaagcctttatgattcaaaccataaatagttgaatctacatagccaacagcttgatccatacctaactttgttaagcctggaagatatgctcttatttcattaatattttggctaattgtatcagaaaatctactaaattctctagtaccaggtatttgtgcttgttgtgctaaattagtcaattctgaactagtcttgaatgctggataacctttagatacacggtaattttgaatatcttgccataaacgatcttcaatttgttgaacctccgtatcagtaaagtatacatatacattcattttctttctagctaatttttctgattctgcagtcattggaccatctacaagtgaactcttcttagtgttatatcttacaccagaatcatcactattagtatttataccagatgacttagatgaagaactagatttcgaagtagtagatgatgtacttgtttttgcatgtacactattacttgttggaaattctcccttagtactggattttgtaaatccattattagtagtgctcgatgacccagtattataacttgaagttgaacttgtattagtagaagcaaactttactacgaaattagcagtacgaacatatttgttcttgccaatcttgtaatatttcttgcccttaatcgttttcctaccaaggatttttacaagtttgcctttctttaatactttcttaccaacacgtttaccctttgcattataaatataagcattctttgtcaacttctttttataggttgctgcttgtacaacggttggggtattttcaacattattattcactaatgccacagagctaacagataaaacagctgctgcacttaagctaaccaataatcttttcttcatttctagtatcctccaatatataatacgtggaaaatttattttcttttttctgcctatattatataccgtttttatgacaaaagcagcagctaattacttagtaattttagtaattaaccctttaatcttattcttaaattcatcattagtcttatacaaataagtaccaattccaccagccattgcaactaaacttgcaataatccagcctgcatgttgcaagataaagtgacctgttcttggcaagaatccatttttacctgtaatagggttatttgatcctggattgtttgttcctggattatttggattattaggattctctgtgctattcgtaggattcttaggattgttgacgttgcttggtgacttcttatctgcttgtggtggaatgacattaactgtattagacttaacgtctttgccatttactgtcatatcagcagtgtttggtacttcaccattaaccttagaatccttctttaacttagcagtgatgttagctgcaaatttcttaccgcccatcttgcctactaaatcagccttaggcttccatgagaacttttcagtattcttatcaagcgtaagttcaccttggctagttacgtcattaccatcagcatcagtaattgttaccttttcaagatcaaggacatcttccaagtcatcactgaattcaactgacttaacgtcttgcttatcaccaacagtgtattcaaccttgtaatcaaagtccttgtcttcttgaaccttatctgattcaccccattgacccgactcagctttaacttgcttggttactaagttaccatatgggtctggggtcttgccatctggcttagaaggatcgttaggcttatccttcttaggatcttcagggttctttggatcaccattaagcgtagtatgaacaacattagttggggtatcttgaccgttaatttgcatatgaccagtgttaggaataccgctattgtcataacttgatacatctgcattcggtttaatgttagaagcaattgcaacatatagtttcttacgtgagaacttagctggatcattagcagtccaagtaaagctttcatcctcatctgaagtaactaacttaccttcgttagttacattattaccatcactatcaatgatgacgacattctttaagtcaagcacattctccaaatcatcacttaatacaagtgatttcatattttgagaattaccaatatcaaacgtcaacagataatctacagcatcaccacgtgaagcttggttattatcaacagttgaagcactaatgatttgcttcaagtcctctttactagttggagctttagttgctacatctgaactagttgcttctttacctgcattagggtttgagaacggcttttgtaagattttaacagcttctgcatactgttcatcagtaaccttatcattagccttgctccaaatgccagtattagggtcaacctttacatattcttgcgctttctgataagccttaggtaatgcaccatcaccatcagagtcttgtcctgaggaagtttcagacttattgccaaagaatttcgtccaatctgcaggattcttaacaattcccttatgtgtcttaggttcttctacctttggggtcacaactggagtatttgatggggtgtctttaccattcgccttaaagtgagccgtattgggaatttcgatggtattgtttttaatatacttttgtaagtctgcattgtctttaactttggcagtaacttcaactgtatatttcttgccaggcataaccttaaccaagtcagcatttggttgccagttaaagctttcattcttttcatcaagcttaagtgtaccttgttcagtggtaatatctttaccatcggcattcttaacaactaccttttcaaggtcaaggacatcttctaacttatcggtaaactcaacatcggttaaatgttgcccttcacctgcagtatagtcaatcttataagtgtagtctttgccaacctcaacattatctctatcttcatgataggaacctgatagtccttgaacacttttaactaccttattttcggctggaggtggagtttcaaccttaacaggatttgaaggaatatctttattgttgtacttcatatgagcaacattaggaatttcgtaattctttgttgctttattcaagtatccacttaaatctgcatcggtcttcagcttgacagtaatatctgcagtgtagatatgctttggcatttgagttagatattctttagaaggttgccaagtaaaactttctttatctttatcaagttttaaatccccttctttagtaacttcatttcccttgtcatcggtgatcttaacgtcttcaagatcaagaaccttttccaaatcgtcatagaaaacaacattactaatgtctttaccattttcaggaattgaatattgaactcgataatggaattcatcaccagcgtcatgcttggctttttcaccatattgaccgttcttatcctctacttgcttaattgcagtaggttcttcatcattcggtgtatgaacataaacaggtggggtcttgatcttttcatcgttatagatcatttgaccaacattaggaatgttgtattgattcgtattcttatccaaatacttgtctaagttagcattcttttgtaacgtggtttcaattcgcatgcttaacttcttacctacccaatcttgaggcttcttagccgtcatattggttgtatttgtccccttatcaaaatctgccgtaaattgatcagtaacatcagtgttaccatcaaaaactctggttttattatgagtaaacactggctccaatttatcgaaaagaaccaatttctttagatctgcattgtatggaacttggtagtaaatatcaaaagcaatatctgatccctttttaaaagtagcatcactcacatatttcacatcagctgttgcatcagccttaacaatattagggtttgcattatggtttgcgactgctacacctacgcccacactacctagagttgctgttacacctaatgcagatagcaattctctagtttgcttttttgatagctttttcaaggctattcctccttaatttaacaaaaaaacacctgcatttttgtcaatgtcacaaatcaaaacattgatttatatgtaggtgttttctaataatatataattattggcaattacttgtcttttgataattgcttgattttgatagaaaatgttttatttgtaccatcttctaaccatgcataatcaagttgtgcattttcactatcagcgagatcattagctttttctgtatcatagtgtaattcaatattattgtcatacaactctcttaagcaagcataaccaagaattgccaagaaataattcttatccttagtcttatcttcaaagacatctggatacaaacgactcattctttccattgcatcaatatattcactttccaacattacggtttgaaaagcataaggtctatctaccgctgtataaggagtatatgctacatatggaaaacgtccataatacttgctagccaatccttccgaatacttaaggaataaccagccagcccataaaatccgaactgaagccactcgattgtcttttctatctactagccatgcaggaaacctttctttaataattttatttgtatcagcaagcatagcttctggtaattcaaaatctacaaaaacttgttttgccataacattttcctttctaaaaatcaaaggaccctctaacatacttagaagctcccttataactttctgagccagtgtatttaccacgaataaaaagtctaccttgacctgtccagtcacaggtaaacaacgaaattactggcttcttcttaaactctttattattccaagctaatcttaaattataaactgaaataaagcgtgaagatgtaatcttgtaataataaactttcttataatctgttaataagattgttgttccattaggtagatttcctcttaccttcgcagtatataatgggctaaagaacgaacgcccatcatccatattatgacctgctaaagcgtaattgcctttacccatcctctgatattggttcattgttcctgcacctaagttcagttctacattaccaactccacgatagatatttaatagaacattatgatctcttattgctatttgtcctacagctcgataatctcttctatgttgataagcatttgcaagagattttggtgatacaggttcaacagctttcatattatagctaggctttttcttttgcttgttctttctttgacttggtaagttcttagtcgctacataattagcagctctaccttgaagatggtcaaagtttgcaatgcaataaattgcaattccgattaaaagcaatgcgataatactaactattgtcccaattcttttctttttatcactttttctctgttgcttgatagctaacctactttctttaatcttcataatttaggtattaaaaaagtcaattagcttaactaattgacctttgattaattttacttacttgcttcccaggctttaatccattctggagcataacttcctacaacagtgaagttcaacttcaagccacgttgagaatatgtgccactaccatcatatttaaccttaagagccgcataagcatacttatctttatgtccttccaacgttcttaaatcaagattaaccaactgccccaactgataacaatgttgcaacagataaacttactaaaatattctttttcttaaacataatttgctcctcttcttactttcttactatttcaacacatagttttttagattttttcttactcttcacctaccttaaattatactaaatacgtaaaattagcgtaataattaatccgtaaaatttttattgtttcaaaatatactcttgcgtacatttaccaaattgatcataagtaaaagataatttcacttgatcattttttcgagaaagcaatgcccgtaaagacaaagtctcacctcttcttattggcgtaaattctttaggatatctttgtgctaaattattacgatagcgaacatactcgtccgcagttaatctttttacatgtatttttttcataacgctgatcaagcgatcaacgcaatcaaaattattcataatttttcatcttaatcccatttaaattgtgatctctttaattaccaacggttttacgctatgaccgataacgatgatggttttctagttagccaccaaactgtaagcttttgtacagtacgtagcagatagcttcacctatctctagcctctcgcttcacgcattccgcaagctgtcctcttatcaatcctaatcaaagactctttcttgcccttcagttactacaacacttaaagagttaagtttatcgactcacttactattgttgatcacattccgacttcttatttactcttgagtttttcatcaaggtattcacatgtcaaaacagccaaaaagaatgtatgcttatcttttagtagcctattacagccattactattacttcaaatttaaaatttcgttcaagctaagacttatcatcaagccaaaaataatagtaatctttattgatggacggctatctccatctcggcaggtgtgattctttcttcttccacccgtgtgtgccttcaattctctgtctcgtaaatcctactgagtcggctcagtagtcatgcacacgtcctacacccgttccagagcatagttgacgcttattctgttttcaatgtactaatggactgtttaccagccctaaaagaactagctgagttgaacagctaaattaaagatcaaagatcaataaccgtaccgactttcttaatgattaacattctaaagcttttacttcttttacctggttagttacaactactgctacaataattgctcctgtcacagctaacgcagttaaagcaaacttgctaaaatttttcatttttatcatctcctttgattttcatttacccattttttcaatgcaactttatcaatttcaccatcttgataacttctcaataattttaaataattacttctggcagcttctttttgcttaattcgttgcattaacttttcttgttgccttttggatttcttaagtcttctgttaactgaaaaacttggtggaaatccttgatctcgtgcaattatttcattagtctctgctagttgtctccgtaacccattgatctgagcgtcatagccaataagaagctctttaggattatcatccatatttttcttcaaatttttcatatttaagtacgctcgccatacatagtaaacaccataaataatcagtgctattgttataaatttatacataattttttcctcataatagggcggaaagattcgaactttcatacaagcattagatgcatgagtatcttaagtggatcaaattgattaagttttgattccgaatgacgaataagaggagcatatcttctcgtcgctatgaaattatatagagaaattattatcaaaatcctgcctgtatttttacccattaaattacgccctagttttacattaagtagctccaatagtatccaataaataaaatcattgtccataaagtaattgctgaaacttgcagcaatactgtcacaatttcgtctaatttttcaaaaaaaatagcatattttgtaccggctaagctaggtaaagttgatattgccatcagtataataaaaattaaattgcctattccaaatgcaattactatatatcgaaaatgctctaatataaatgaactgatcataatatcttacctgctaacatcaattagcggctttttcctatgatgatcgggatattttcttttacacaataacctgcgatgtcctaatttaggatttacttcaaatccaaagcctaaataaatttgatcataaatttcacttacttgataaaagggtattcttttatatctattatcatttttacgatatttttcagttgcaaaataacctgaatccttaacaaatactccgtcaatgttccaataatgatagccatctattgttaaaatttcataaacttctttttttactcgaaatacactaaaacgtctattttttactgacttccttgccatccaacactcaccaatcatactatccttaaaatggtaaatcagcatctgttaattgaacttctttttgattattaaaaggatcttccgctaatttatcttgcttatttgcttctacaatagttcgatcaacttctggctcttcatcttccatattattcatattttgtttatttgtattttgtgaagggctattggctatatcctcattttgactagttaagatatcaaatgaattgacccaaatatattcatacgctactctattaccatttttgtctacaaattttctaaccctttgttcacctgccaagattacttttgaccctttatgtgtattagctactaagttttcagcaactttattccaagcaattacatggtgccactcaccaacatagcctctttgaactttactataacggttttgacaaatagtaaaggttacatacttttttaaagattgagtagtttttaactctaaatcttttccgatgtaaccatccattacaacttgattaatcatatttctcgctcctctctcttctaaaatatttttgatatttatattatatatcgtttttgcgatatttcaagactaaaaataaaaaagatacagaatttttgttctatatccttaaactagctatcataactacatctaatttgctagaatagctttagtacgaaaaagttaaataagcggtggtactttcgttttcatggaggtggtgccaatggtgtattaactattgccctaaaatctattgaaaggaggtacagtttgccaaatgacaggctttttacagtctgtcatagccgtaatctatctgctttgtctactggtagtaagtctcatcttgcttaccaaaaaagtaacggagtggttcaaagccttaaaagatatgattgcagcattccacgatttgtggaaaaagtagagcaaactaaaaagccgctcacaaacttttggcagagtttagcgactttttagttgtataatcaatgccaccgcccttttagcggcttcgtactaggagagctattagcagtagctctcttttttgttcactaatattatagcaactttacgctaaaaattaaaatatttcaacaacttattaggacacaaatgaccctaacattgcattcacacccaaaattggcaattgcaccgaactatattgggtgaagcttaattatttttgtcatgcttttgccttctttacttctttgctctgcttaatttttcttttaatccaagcaatacccatagttacacccttaattcctagaaaaattacgccaattactagtgcaattctccatacaccatccatcagtgttaacagagctggaaaaatcagatagattccgaaagcaagccaaaccaatttccagagatggaatgctgaagcaagaataaagacccaaaccataatccaaaaccaatctgtttgtgaaagtactaaaaacatagcgttctccttagcattaataaactcttattacctttgtctgaacttgaggaatattacctctagtattgataactacttgcaaatcggcttcaatttgccttgcttgcttagctttaaaaacttttatttgatttttaggtacgattgccttaatcactataggggtatcgtcctcaaaagaatgatgatcatttgataataattcaagcatcgaacatccttgattcatatcaacattcatcactttaagcgagacagacttataattcacagtttgtttgtctcttttggtaactctattaacatacttttcttctgcgtctgtcttgttaaagactactgctatccaaatcaaactcgtaagaaagtaagccaaatatatgcttaaaaataatttcatagctagctcctttcaactactactagccattttccctcgccagcatacttaattttttgattagctttaatgtcaatagattgatcgttaagttgtttaacacgaacataaaaactattactatccaacggttgaattccaagcacctcacttctaaagcgccaagtaaaaactttagctaattctgcaggtatagctagcattccaagatataaatcatatttattcatcatgaacccccgacatattcatataatcttcaaaagttttcccaaccaagctacctattttggcaatatagtcttgatcatagattctgctgtttaatactttcggactattccccattaatcccaatgcttccccagctaaatagctgcttaattctagcctttgtttatcactaagtcgttgtccatctagttcaagatcatctgccatactaagaaacgcaatggaaaacaatatatcttcaatttcttgaatatcaattttttcattaagcaagtcttgtgcaactttttcatttttaggattcattcttacaaccccacatccatctaatcaggttttctttatcaatatcttgtgatcttatacaaaaatatcgtaaaattgatatattaataatgatttactacataaaatttaaatttttaaaggggcaatatcatgaaagacaaacttaaacaatccatcatcgcaattactagtgccaatctcaaaaaaattttatataatcaaaaactaactcaacgagacttggcaatgctaactggaatctctattccttcgattaatcgttattacttaggaaatggtgccataccacaaaacaacttggttaagatcgctaaagccttgcatgttgcacccgatgaacttgatccttcatatcagcccactaaagatttcttgtctcaattagctgaaaaatctgataacccagatttaaaattcagaactgactatcttaaacagttaattcaaactagtaacttatctgttcaagaagttgctagcagacttaatataaagcccattacagtctataaatggctagcaggggtaaatacccctagcaaggaaaatacggctaaattagctgatttatttaacgtcagcgctagttctctagtaaacacttctcaagaagttgagttaacaccgcaacagaccaaaatattgggtactttaccacctgatttaactgatcaacaaacagatttaattgtttctttgattaaatctgtactaaaaaatgctaactagttttcgatagattcatacatgcttgaaattccactaattagtgctagctggcagttaattctccattgccaccagttaagtatgtattcgacttgatcatttgaatctagcatggttactgagctagttgatacttgcaaatctgaatcttctaggattgttttaatttgaattgcaagattatctgacgttgttttagtttcttgcttaactttaaggtgattatcgcttaaaatgtcgcttaataaacgtgaggactctttcaaattcagcatccaattagaaggcaacaagtcgtcaatagcgtaacctaactcatctactttgaatataaacttttcaaaattttcttttttacctgttaattccatttatttctcccaactgattaaatctatagctctttgtggagcgttatttgtttacatgtttttgcattttatcttagctggtaatttttgcattccagtcaatctcgtgttgatgtttttgcatccactcacaagcttctttagcaaaaataattgtagttttaccagctggcgtttttctggggtttactacgaatccatcatttttataatcaacttctggaaattcatcgaaaataaaagttcttacccagttatcacctttgccacgacaacagtattttctaaactcatcgatattccaagtcttgccagttaagtcttgcttatctgcactaacagattcttttacaatacttttaattagattcgtaaggcttggaaggttgattaatgtgtcagacatatcttcttgcattgctatccccagctttcataatttctatcatttgctaagccatctctcagcatctttaacaaatagctatatggtttgcctaccatgtcccatgacattctttccttgaatttatccttaactgcttgcaaagtatctacgttgcattgatataacagcccccgtaactgtttaagctcatcaagtgttggattggtagaatgattttttagcttatcgttcatccttgcaatggtaaaaaactctttatagattttttctctttctggatcttcttctttcttcgcagaagaagaattactaactgtattactattaaatgtattactagatatattactagttgataatttattaaatacccctttagtattcttaatacccctatttagttttttaacgggggtatttaatttactaactacccttatagttcgttgcgtaacgttattctttgttgaatacatagtggtgatgtagcctttttcttttaagcttttgactaattgtgatacacgtcctggtgtaattcccaagaaatcagcaaaaagcttattactagcaaaacatccattttctccatcaagactgtcaatttcagtaatcaaggcaacctccatgatagttagatctttatctagccaatactcagcaggtatccaaacacctttaaatttatgatttgcttcactagtctttcttttcttagtcattgttattgcctttttctttctttaagtactcccataatgcggtcacgatcaaactatttttcgttatgccacgataagaagctaacttggttaattcttcgtccaaataaataggcactcttacgcctgtcgttttctttggtgttgtcatagtgttatcacctcttgtaattatattaaagtgttatcactttgttgtcaatggacattttatatgtttctttgatgttaaaatgtaatcaaattgataacactattggaggtgcataaattggcttctaaattacctatgtttggtttgagagtagacccagcattgatgaaaaagcttaaatatatagcttcatacaacggacgttctgctaataaagaaattgagcaattaatcatcaaacacgttcagcaatttgaaaagaaaaatggaaaaattaatgcttaatttgtttccatagcacattaacaattaaattattaatgctaatttgtttacgctctgctaatcgtctaagaccttcatacaggtcattagacatgcggagcgttatttgttttcgagtcattgctatccccagctttcataatttctatcatttgctaagccatctctcagcatctttaacaaatagctatatggtttacctaccatgtcccatgtcattctctccttgaatttatccttaactgcttgcaaagtatctacgttgcattgatatagcaaacctcgtaactgtttaagctcatcaagtgttggattagtagagtgattttttagcttatcgttcattcttgcaataaagaaaaattctttgtagattttttctctttctggatcttcttctttcttcctagaagaagaattattaactgttctattagatgatctattaactctgttatatttatgtgacatgggtgacactgggggtgtgacattggtgtcactacccttgtgacgctcagttccccaccctagtgacatgcatgtcataagggctgaaccagcatgaatttttcttcctaaaattgcaccatttttatcactaacaactttttcacgctcaattaattttttcttttcaagcaaatccaaatatctattaacctgacgacctgatacttttaaatgttctgcgattttttggttactcataaaaaactcgccagtgacattaagcattgagataatttcacccattaaaagtatcgatttaggttttcttaataaatcttcatctcgtgaaattgatggtggaatcatcagaaatgctttagatcctttaaattcattttccatctgttatcctccctttactattcttattggttaagcacttgattgctcagcatattactattttgagtagttaaaagctctaaaaaaaatatcatctttgctaactccaaaataatcagcaattttttgcatcataggtggtcttggagtagatctacctgtttcccatgctgacaccgtaacttgcgttgtacctaaagcttgtgcgagatctgattgactcatgcctttttcaactcttaaaattttaagcttagttaacatttaatacctccccttaactacatttatatattatactattttaattagtatttcaagatagaaatcaaattaaaactatttttagtagtaattcactatttttattagtattagtagtaatataaatgtaaattaatagttaaggagcctagaaaatgaaagattatgatagaaagaaattagcaaataatatcaaaacacttagaaagcaaaagaatttaaatcaagcagaattaggtgaaattttacatgtttctcaacaaactattggatcttgggaaacaggtcgagcaattcctggatcagatacattaaaaatattagctgactattttcaagtaagtactgatgagttactcggaagaaaaacatctggttcagcaaatgacaccgatctaagtgaaatgattaataatgctagattcttcgatggcaaaccaatggacgaccacgataaagaattagtcagagatattctaaagagaatttacaatgaaaaataggaaaaggtgtgcattatggacactgaacttaaaaaaatacttaaggaatcacacataagattagaatttgctcctctacactgcccaggtttgcttgttcatggtaaagataataagcctgatgtgatgatagttaactcaagctatgatgatgagcaagctaaaaatgtaattctacatgaactgggacatatgatgtacgacaaggatgtgcaaggtgattatcaaagcgacgactgcgcacacacttgtagtgaacatagtgctaattcctttttaatacatgaaagagtcaaacaatactttgcgttaggtaatgatcttcaaaccgctaattggctaaattttgcccaaagtatcgggacaaaggattactttcaagtacaagaagaactaagtaaatataaatttgaagaatgagtctatgaccaaactaaatattactaactatcaaaaatacccgcctacttcactatagtagacggggcaatttatataagcagcatataagtaacttatacgtaatgcataaataacatatgaataatttaaatttaagaggtaaataagatggcgcattttgaaaaaagaggcactaaatggcgggcacaagtatcttggtatgatgagcaaggtaagcgttgttttaaagtaaaacaggggtttttaaccaaatctgcagccagaaaatgggctaatgaaatggaagttgcaaaagacgccaatcaaatatctaatcaagaccccatttttgctgattattttaaggactggtacgagacctataaaattcctggcaaatcaaacaacactcaaaatagatataagcacatttatgtattactacaacagaattttggtaaaaccagaatttcaaaaattactcgccgctcttaccaacattttatgaattcgtatggaaaaaagcatgttaaagatacggtctataagactaacggaacaatacgaacttgtgtaaaagacgcaatgagtgaaggattagttaaaattaattttactgagcgcattaatcttacatggaatgaggaacgttcaagaaaaattgaatatttaaactttaaagaggttcaaaaactaaaaaaatcacttttaaaagatattactccctcttatatcagtcgttatatgctactaacaataatttatactggaatgcgtccaggtgaaattaaggtgttaacatggcatgatatcgacttcaagaatcacactattagtatctctaaatcgtgggactatgataataataaaataatcaattatgattctgacgacataaataaagaaacgaaaaataagtcatctactagaatcatcaaggtagatcaaaatttattgaatattttagatcaactaaaggttaatcatcatgaacgactattcatcggaaaggatggaactattccttcatcaaatgctgtaaacaaagttcttagaaaacaactggcaaaaaataagattaaaaaagatggttttcattttcacagtttgaggcatactcatgtagcaatgttactatttaagggagttgacttatactcgataagtaaacgactaggacattcaaacatgagtattacagctaatacttacgcttatatgctagacgaattaaaacaacaatctgatcaacaaatagtaaacattttagatcaaatttaattaaatggataccttttagatacctctgcaaaacaaaaaccgctctagaacaacatctagaacggttatctatggagatgaggggaattgaacccctgtccaaacgcatctcgtcactgacctctacgatcatagttatattacttgaacttcactagctcaaaacgccatataacagggctagaatgggctagctaacctgttaagactctttttaactattcaggtgaggtagttaaacgtaactcgctaaagttgatactcggtgtcagccacgagtaaaccgacaaggagcaacacatgcgcttaaattaagcagctaatgcgtaagaatttttgttatttgcagttatatttaactgtaacgtttttacgtagtcgtaacctacgaaccgcagtcaatgcgggtctacgcctgtcgaatcccaaaacatccccttgagatacttattcattatagcatagacacacattacatgcgataaaaatgcttaatcaatattagtcaaacgtaccacatcacgttcaatcatcaattcttcattagttgggataaccattcctgcaactttggaatctgtttttgtgattagtccttcactaacactttcattagcttcattatctacaacaacacccatatatgcgaaagcgtcaagaaccgcttttctcacaccagtatcatgttcaccaataccagcagtaaagataattgcatcaacgccgcccatttcggcaatataagcaccaacgtagcgaataatacgattaatgaaaatttttcttgctaacttagcccgttcgctatcactttcacgcacatcgcgcatatctggtgaaattcctgacaagcccaacaaaccagacttattattcatgatataaatcatttcatccatcgacttatgctctaccttcattagatgttgcacgagtgaaggatcgatatcaccggttctagtagccattgtaattccggcaattggactaaagcccattgaggtatcgtaagacttgccatccttaactgcagtaattgatgcgcctgatcccaagtgacagatgactaactttaagtcttttaaatctttacctagtaatttagcagcacgcggtgctgtatagcgaattgaagtaccatgagcaccatatttacgtacaccatatttttcataatattcataaggaagtgaatacaaataatgtactggatcaagattacggtgataagtagtatcaaaaaccgcaacttctggcacatttggtaaaacattcataaaagcttcaattccgcgagcctcagcaggattgtgaagcggagcataatctgacaattcgtagatcttaggcagattttccttagtaataatagtagaatccttaaagtactctccaccattaacaacacgatgtcctacaccgacaatttcagttagttcttcaacaacatggtatccttttaaaaacttgatcaataagctaactgcagcttcttgatctgggatttcagttttttcaacgtgcttagtaccatcagctaacttaatctcaaatgatgaatcttcaagacctacacgatcagccattcctttggcaagaaccttttcatctggtaatgagaataatttgtacttaaaagatgaactaccagagttaattgccaaaacttttttcataaaaattaattcctcttctttcaaaaaaataagtgctttatcaattaatgattaatctttgcataccactcgttaagtttaacattaaattgaattaaagtctcttcttttttcaaggaaccaagtttggtaagcaaaacttcacttgctttggcctcatcaccgtgattttggaaaactaaaactgactttggattaaacttgttcttaaacatatcatctggcaactctacaatcgccttcaaatagactttcttagttaaccatggcataaaatcagcgccaatcttgcctgacaaaatagacttaggaactaccaaaaaggcatagccgttaggctttaaattattaataatttgttcgattaacaacaaatgagcaaaagaatgacctttcttagcctgattttcaaaattcttggcattctcatcaactggataatagcctacaggtaaatcacttacaattgcatcagcgttaggacacatccaaggcattaaagcgtcttgatgatataactcaatgtcaatattattcagatgcgcagccacatctgtcaaacttaacatatcttcatcgttatcaatccctaccaattgataattatccttagaatgattgagtgccttaagttgagaaataattgaaaacaacaaattccctgtacccacggcaggatcaacgatttccatcttttgatcttttaataatttatgcatcaacattgctactactgtagcaattgcaggtggagtaggcatttggttaacatcaaagccatcatcattaactgcctttaaagttagaaaagtaaagacttgagccttttctttttggctaatttcgtcataatctattgcttgatacttttgacttaattcagccactgttttttcatccggtgcaccattttcaaccttaatcttgccactttctaagttatcaaaagtctctactaaggcttctgtaaatgaaacatttaatgccgtttgcaaagtttgcacacagtctaaaaactgattaaaaagtttttccaaattttccatagcggtccctccataccttaattattttatagaaagggataaagaggtgcaaggaaagtcaatcatccgttaagcattcgataattaggcgattgttctccatgctagcatgataaatatcttgatacattttgataaacaaaagcgtggtcattaaaactaatacactacttagtaaggcactgccttttacgttatgcgtctttttctttggttttagcatttttcttttcctgttcctcatcaagctgaaaaactaaatctgatgcacccttatttttctctgttaccctaataatgatgctatctttagtggttttaaaagcagccttttcaacgttaaataataacggcatatagcctttccctgcaccagatactttaagtacgttctttttatagtattcaattcggtaagtagttgcatcgcctttttgatcgatgcacttaaaggaagcactattacttatagctaatttagttactggatacactgccttaattttgtcagcccgcataaaattttctagctgtacataagcataggctacttcattgacatgctgattttgattcaagtttgcttttttaacactcaacaataaattttgtaaaattagcagcaccatcatagtaataaaaagcgaaaacattgcttcagctaacataaaacctttactctttgaccgcaaaagtttgtttagtcgttgcatcccaaacatgattacgtcctgccttttgataaattcgatcgtgaactgttacttgctccaggtcagttttagtcagtatatggtaagcataagcacgatctgtttttaattccatctcacgaccatttttctgattttcagctacagttatataaaagcaactaacagcaatcacagcaattataattgctataaagctctcaattactagaaatcctttaacttttatcattccgctactctcccccacagcatttgatatttcaggcttttttccattccgtagccactaaaagtcaccgtacctggtttagaataaccagtcaggttgaatttaaaatgatccaagccagtaattttgatattttgatcaactggaatacttttgtgatattttccgccagagaataaaatttgattggatttagctagatatgatacgcaaatagtaacctccttgatcgtactgtacctcgaagtttgatcaagtgccgtcgtaactcttttaacagtattatcaaaaatcagtttttcttgatatctttttaactgcaaactaccaatcaacaaaatgccacagcaaacaccaagtgtaattattacttctagtagggaaaagccggctaatttatttcttttcaacgacttcgccactatctaacgtgaaattctttttagctttagtaatttgatcaccagttaagtaatcgtccttttttagatcttcaaaatctttaggttcaccatatttatccttatataactcaacttgcgtttgcacagtagtcctaaatgcatccgcagttttagtttcagcattcttcttttgattaatcaaattaggcacaattagcaaaatcaaaatcacgataatggcaattaccacaaccatttcaatcaaagtaaaaccctcttgcttgcggcgcttagccataatgtttgctaaatacttcttcatcttctctttcatttttaacttaatcctcttcttcactctatttttttacttttatctttaatgtcactttttctatagtccttgcatcattgaatacattggtaataacagcttcaaatacattccaataatgcataagccaattaaaataaaacaagctggttgaacattgacgactaatttctcaattttttcagttaaatccaaaaataggctacgtcctaataacaaacagcgcttactcaagctctttcgctcagagccagtctgcaataaaactaataaactattaggcaaaaaatcctctgcattaataatttcttctaaattttttccttcagctaaatcgtgccctatcttttgtcccagtgcttgctgcaatgaacctttctcttgatctgccgcatattcgcacattcgctgcaatgaaaagccactagctagcagcagtccaatgtcataaaccaacaaataatgaatatacagcataactacctgcccaattaacggatatttactcagttttttcattgatgaataatcctgtttattgagcaaagtaacgatcttagcaaaaaaatataagcccagcaatacaataatgatcagaccaatcatgaccatatctcctgaatgatcactgctatcgctgaattgtgtcgaaataaacgattgcataaagaccagtaaaatcaccatcattatcgctaaaaccaacggataagataattcagcccgcagttttttcatctgctcctgttttagtcgattcaacgttgctaaatgctgcaaacattcaactaggtttccttgctgtaaagccaaattaacctgagttactgtcgttttagaaaagcctagtttaagcagttcagtactaaaacttgctccttctttcatgcgactagccattctttccatcaactgacacctttttggccacaatgccggcattaattcaattgaattgagcaaagaaaaaccattatctaaactatgttttaaataatccaaaaaggccaattgttcttcgccatttaacttatcctttttggaattgccaatatacttcatgattaatttctcctcctttccacaaacgctctagattttcctgccaattaacgaattcaccacgaaccgatttgcctagctctttttttagcaaagaatctgctgcaatatccatcaagcactttaattttccttgactgactaataatcgctgatacgacactgcagttagacaatttgtcagttcgtcacacctaatacctaatccctctagtcgagaaatagtttgcaaagtacttttagcatgaactgtcgcaaaaaccaggtgtccacttaaagctgcatcaactgctaaacgtgctgttccttgatcacgaatttctccaataattaaaatatctggacgatgccgtaatgccgcctttaacaggttttggtaatcaattcccgcttcgttattgacttgtgcttgcaaaaaagaagactcatgaatttcaacaggatcctcgattgtcatcactactttgttttggctcattttcttagcaatttcatacattgtcgttgtcttgcccgagccagttggaccactagtaataatcaatccgcgactcttagccagcttttcaattgttcccagctgctctggaataaaatattgactatggtcaatcccatagatgactcgaataaccagtgactcttgatcggaaaaatctcctaagctagataaacgcaagaaatattcatgtccttcattctcatatgtcattgcgccaacctgcgggcgacgatgttctgcaatatccatctgagcactgtacttaaaaaaattgataatttcctttcccgtctccaaagtaaaacctgcatattcaattagacccttaccggtccgaaatttaaccatcaagttttcttttttcgggaaaaagaaaatatcacttgctttaactttaattgcctcaatcaataattcactgacaatttctttgatcttcataaaaatcctccttttttgcctcacattatttattacgcaaaaaaaatcgatttttttgtgagaaatttaaaaaaacacaaaaaattttctcaactctaaaaaacgttgatctaacagcatttcaagattaaaaaaacattaaaaaagtacacaaaaaaaatagcttagccattggctaagctatttcatcattaactaattaatcttcatcagccgctgcagtataaacattttgaacatcgtcactatcttcaagagcatcaactaaatgttcaaattgttccttcttatctgctggaactggagtggtgttttgtggaatcatagttaattcagcatctgctagtttgtaaccatccttaattaaggcgtcacgtacacctgcaaattgctttggatcagtgtagatttcgtatgcatcatcactagtttgaagatcgtcaccaccagcatccataacatcaagtaatacttgatcttcatcagcatcagtagttgaacgatcaattacaatgtagcctttacggtcaaacatgtaagcaactgaaccagtagcaccaagtgaaccaccgttacgagtgaaagcaacacgaacgtccgaagctgtacggttcttgttatcagtcaaagcttcaacaaagactgcaacaccacctggagcataaccttcgtaagtaatttcgtcgtagtgttcttctgaaccaccttcggccttcttgatggcacgcttgatgttatccttaggcatgttgtttgaacgtgccttatcaattaccatacgtaatgtaggattcccatcaggatcaggaccaccactctttgcagccatataaatttcacgagataacttttggaaaattttacctctctttgcgtcttgcgcattcttgcggccttgaatattgtgccattttgaatgtcctgacataaggatccttctttcttttttctaatattaattaacgatattatcttaactcacagcacctcaaaattcaatggtgtcaaccatttaaacttgttttttctggtcaaaaaatctgtgtttaataaacaatactagcattatcagcaaaattgccgttaatgctcctgctccatcaagcattacatcatgcacgctcggtgttctatcacctgttaaaaattgatgatattcatcaaatacagcaaatgcaattgccataaaccaagttaaaactggtgctacccatttgattttgaaaattcttcttaatcctaaatagccaaaaccacctagtaaaaaataagaaccaaagtgagccattttacgtaaaacaaattgggccagccctgctcgaccatcaacttgcacattgtgaatacgaccaccgtaagtaaaatcccagccagcaacgatattctctaaccagccaaaataacggttaattttattgtcatgaatttcctgctgttgataagtcattgaactagaaatgaacaatgcaactagcaccaataaagcaagcagtaaaaagattttttctcgtttagtaaaatgaaatttatccattgctatttcttctctcttttttacttcttactttaacaaaaaacgggttaaacttgacccgttttataaattatttaactttgcttaatgcttcatcaattggtgtgtccccatcatgcataataattacttgatgaatcgtattatcatactttaggctatcaaccaatacctgagcaacatcatcaatcgaattttctccaccttctggagtaaatgatgtcttacccgttgctggcttctccattaagttacctggttgaatgatcgtataatccaaattagtattatgaattaaccattcatcagaaaagtacttagcaatatcataatcaataatgcttgcaagagaaggaatttctgcccacttgtcttggtcaagcgcaaaggcggagcttagttgaacgtaacgcttaacgccattagcttcagcagccttcatcagcttaactgcgccatttaagtcagtttgcaataagtcctttccacgagaacctgctacaaaaatcactgcatctgggtgacctaattcttcggtcagcttattaagcgaatcatgaaaatccaaatgttgcacccgcatattaggagaaataatttcaacagtattttctcttcttgcacctgcaattacttcatagccttcatctatcaatcttttgattacttctttgctcactctgcctgtagcaccagctacaaaaactttcattgtttttcctttctaccagctagccttcttaacacctggaagttgacccttatgagctaattcacgcatacattctcggcataagccaaacttccgataaactgaatgcggtcggccgcaacgttcacagcgcgtgtattgtctagttgaaaattttgtttcttttttgttacgaataatttgtgatgtttttgccataaatacctcttatctgcgtctatttattctttgaggcgctggctttcttttgctagttaatagtcccaacgccaaaataataattccaattgccaatacttgtccagtcattaacatccccacctttctttttgactcttactttttgttggtgtattatacatgcttacctataataagtaaagagatttgattgtaaatagaaagcgttttacactagtctgatacattccctgtcaagtagacagtagaattacataaagcttttattcctcagttgattaataatcagctgaggattttttggcttctcttattttcttttcgtgtattttttgccagtatttctcaattcgatgatttggtgcaatagggcaattcttaatattgcctttcatcgcttctttgcgcatttcaccagcagttaaaccgttaaaacgtttctgtggatcttcattaatgtagtaatctattgtcttacaaatagaatcattaagttcatcataactggccacttgaggatgaagaataactcgcatttctttgataatgccttgccagccttccattggaccattatcaatacagcagccaacacgagacattgattgcgtcatgccttggtcttctaattggttttggaaaggtgcgcgagtaaattgaaaaccacgatcactatggaaaagcggatgagcattagggtatgctttaacagcctgcttataggctgcttgaactaaagcagtatcgtttcgtttactaattgcgtagccaacaggatagcgatcatatagatcaaacacagtacatagatatgccttaggcaggttagcagcaacgacttcagtgatatctgtacaccatttttcattaggtctagatgcattaaagtctctttttaacttgttttcggccgttttctcaggcgttgtatgcttgaactttagcttctggtatctaggcttttgtgatctaatgccattgatacacatcaagcggtaaacagttttatgataaaccggcttttcatcagacatctgtcgattaactgccatggtcatcttttccgtcccaaacagactgttgttagacttagttatttcaatgatctttgcttcaatctttttgtctcgttcttcacgcttactcggcttgcgcttaggatcaaagtatttgtaataagctgagcgtgctattttagcccatttgcacattaaatcaatcttccaattgtacttttgatggcagtcatggattaactgatatgtttcttgtttccagcgtctttttattgcggcttgtctgtatcttggttgtccggcaagcacatcctttctaactgatctaatttttttaggaattcgttcttagtttgttcttctttgagctgacgctctaattccttaatttttcgattagccagttctaactcagttagctcttctggcttcttatgtctgcctcgtttatctgttaatcctgtttcaccattagctagatatttgtgtgtccagctgtaaacctgctggtaagaacaatcaaatttgacagctgtttgagtgtaattcttgtcgtgattaagacagtattgaacaatctgaattctttcttgctgggtagtttttcttcttgctttagtcatatagacctccggatggggatcatagtcccgattttctatatgactattatacttggaaacccattctgatactgttccattgcttctaatgccatatttattagctaaagaaggtaacgacattttgccagctaaatattcttgaacaaccttttctttaaatgccttagagtaatgattattgtattgagcattacttagaagggtatcacgattgctttgatattgatgaacccatcttcttacttgcatcgctccacttttacttggcatcttaagccgtttagctatttcaacgctgctcctattaccattcaagtattgttcaactgcccatatcttttgatcgaatgaatatttactttttctggacataaaaaatcccacctccatggataattgaatactttatgtatttaaatcgtccactttagtgggattgtatcagtcacagttctttttaataggtaaaatttatttgaatactttcatctaagaaaggaatagaatgaacgaaaaatgtaaaaataagtcgccaggattcttatctttttagggagtaattatttttaaatagagaaggatgagaattaattggacgatttaacatcaacaaataaaatgaaagccatcacttggcctgttttgaccttgatggcactttgtactgttatcggcttggacgatatcatgtacaacttccaaaaccaagggatgccagttatcacctcttggattatcatgtgtttgctttatgtaacaccttactcattaatggtaggacaattaggttctacgtttagtgaagaaggtggcggactttcatcatgggtccgcggtactgacggagaatttttaggttacttcactgcttggacatactgggcagcctcaattccttatgctgtagactccgctaacgaaatcattgtcgacctaggttgggcattgaccggttcaaagggattccaagataaaattcctactaccatgtttgctgctttgactttcgttgtgttcattgttttcattatcgttgaacaccactttgccaactcaatggaattcctttccagtattggtggtggtttgatggtcattatgactgtcttgtttgttttccttgcctttgttggtttggcaaaatcaggcggtcacatggctacccaaccatttacttggcacacaatcattcctaaattcgacttgcactactggtcaaccgtcggaatgttaatctatgccatgaatgggtgtgaactggttgcaccatatgtaactaagatgaagaaacctaagtcagacttccctaaggcaatgattactttagctatcatgactgctttcttaactatccttggttcatttgcacttggtatctactttgacgcataccacattccaaacgacttgaagatgaacggtgcttactacgtattcgacatggttggtaaacaattcggtatgggtaaattcttgctttacctctgggcttggacatcattattgttcaactgtgccttggttgccgtattgcttgatgccatgactagaatgcttatctccgacactggcgataagtacatgcctaagttcttacgtaagaaggacaaaaacggcttaccaattaacggttacatcttaactgttgccctttcatcattcatcatgatcttaggtatcttcttacctgacatgaacgatatcttcaactggttgcttaacttgaactcaatcatttcaccaggtgttacctgctggatcttctactcattcatgagagtaagaaagaactcaaagaagtacccatcaaaatatgtctacattaaaaacgataaacttgcttggcttgttggtcttgccttgttagttgttactgccgtagcaaccatccttggttttgcaccacaagatgttaagcaaggcagtggcctttggtggtacgaattgatcattaatattgtagccgtaattgtcttaattggtttgggtgcaattttacctggaattagacgtcgtgaagaagaatacggtattgcttttgacaaatctcaatggatttggatgggaattatcattatcggttctattattcttgacgtatggcttggtagtaccaagattccagcaagaatcacaatgattatagttgaagctatcgctgcattaatcattacttggattgttggacgaagaaaaccccaacaagcaaccatataaaaactaaattacaaaaaagctcgcaaataatgtcattaattatggcatgctttacgagcttcttttttgctcaaattgatatcactttcactctatattctataatcatatagtaatttacaattattttgtaattttatatactcaacaaggttagcactaagtgttatactaaagtataatggagataaggtatatatttatagaattatttaaactgagactgaataaaatgaaaaatataagaaagaagattatagtatttctgctagccttggaatgcttagctttttgtatatcctttaatagcaaagtgtatgcatcatggagtcccgcttcagaatggaaagaaaatggctatcctactgaggactggacaacagatcaatttacataccatcaaataggatttattaatgatcctaaaaataatcaattgttgttatatgtagacatttgccctgattctaaaaccaatagaaatagtcatggatatgaaggtggatatcgtcaattgcagccatcagcctacaatataaatgttggtaatgctacatacagtgttaatttagatgtcaatccatggaatattcaaaatggaaaatctggatatgcaggaattggagtatgggatcctcaaactaatcaatataaagcaactaaagataatctctgtcattattatgcagatagtgatggccgccaatcggccataattaagattccttacaatatgtttaacagagatgacctaaacggatcaactaaaatgacaatgcaaaatcctaatttgggtggcaacacaaaaatcacaatcagcggagccagcaccggcccatacatccctgccatcatcgcttttgtcttagcttcaatagccgcaattagttattaccataaaagaaagttagtacgtcatgaacatcagtaaaatatccccaaaaatatttcattttggaaatggtgtcatccgtgcctttttctttggcttgattataattagcttcttcgctgtgctctcatctactaattggctgccagatgcaaaaactacgaccggcttaacttacataatgtttgcactactattaattttagttttaagctggttctcctttccaaagtttcaaatgttcttaaaaacaatttttatcaagcataaatggattacttctattatttgtttagtccttgcattaatttggcaaattcaatttgtctacttcgtacatcccgcaatcggatttgatgttagtgctgttcacaataccataatcaatccgaatctacctgaattaagaggatatttcagtgttaactacaacaacctatccatcctccttactctaagacaagttgccaatatctttcattcaaccagttggttaacaatggctttatgttcaacacttgttacagatttaagtgttttagtaatcatcgctacaattgcgataatcaattttcaaaaaattcccaatatcatttatattctagctagtctgcttagcatattccctatttgcatggttccttacacagatgtatggtgcttgctccctatttcactttcaatttttggctggagcatcgctacccaaaaatcatatctagttgtcattcgttttttaggagcaattttatccggaattagcttagcatgtggcgtttggatcaagccttcagttgctgtttggggtattgccgcgattttaacgagtttactctatattttaaaaaacaacaaagtaattctaacttctattttctgtttaactattgcagcaagttttgttttagcctatcaacctcttaaaaaagcggttcaagatcagcattacatcatcgttaatcaaaaacgccaaattccgatgatccacttcatcaacgttggtttaacacatgatggtgcctatgatccaaaagcagctttaaaaatggatgagcttcctactaagaaacaaaaagttgtctattctaaaaagatgatcatcaagcgtcttaaaaaacgcggtccattgggttatttacaatttctagttaaaaagcaaggtctaaatactgcagatggtacattcggctggctgcatgaaggccattttattatttccaagcagccatcagaaggctggcgaggattcttagcggaatttatctatccaaatggaaaatatgttattgagtttagatttatcgctcaaattctttggacaattattatttttgtattgctattcagttttcaaaaaggcggctttattattcaaacgctaagaatggcactagttggcggttttatattcttacttctttttgaaggcggacgtagtcgttatctagttcaattcttacctattatcttgattttaacagcactttcagcagacactgctaaatataatttagataaaattttgacagcaattctaccgaaaagaggtttttaaatatgaatcttagtttaatttaccctactatctctttaccaatcattacaattagcatggttgtaactcaaacacaaatagaaaaagtatgggagaaacagctagaagactggcgtcaccatttatttatcatattgtgttttactactttttacatactccaaactgtttgtattgcaaatgtaaccatctttacctttaaagcaattgcttatatgtatgtcattccaacaattatggtattacgcaacaagcaacatatttggtggtttttgctttttatcacaccactaattccgttacttattggtcttgatttaaagagatattcatttataaatatccccgctactttattgcagatttcatccatcgcattaatctgctttattctaaatcattgtcaaaatctttcatatcaagttaagtatatcattgccctttattcagggagtctcatccattttgtacgtctttatatagaaaatgaattacacctcacatttttaatcgctttgacaatcggaactactttcaccatcattggtgaaagctggcgttattattttgaaagtcgacatgaagaagcaattgctaaattgcattacgaaagcaagcgtgatgaattaactggtcttcttaactttcgcgcttttgaccaagaaatgaaaaatttatctaaaagacctaatataactaatacctatattggcgctattgatatcgatcattttaaagtaatcaatgatacctatggtcacttaaatggtaatattgttctgcatactttttctaaaaaactgaaacacgagattgataaagcttttgctcctaattgtttcgtttaccgctttggcggtgacgaattttcaattgtcatttttaatgctaatcctgaacaaatcatcgctgcactaaacaatgttgaacaatatttccgcgataattttatcaaacttcctgataataaaactaaaataaagttctcgttttcatgtggcttcacgaagcatttatctaatgaacatttttataacactcttgaacgcgcagatgatttagtttacaaagtaaaaaataatggccgcggaaaaatattgactgattaaaaaactaaggaaatgaataatgcttaatggatatttaattggcgggattatagtttggttatatgccctttcagtaactaatcgtgcacatttatttgctttttattattgggttggtgctattggtgcttttcttttaactacttttgcatgccacaaatattttgtctggttcctagctagcctagtgagccgcggagctggtgtgattggacagctgactcatagctttactgcttatccgtttccagctgctttagacattcaaactacttttggatcaattaccctattagttgactatgaatgttctggaattattgaaacattggcatatttaagcttattaattttctttcctatttacactcgtcgtcaaaaggttgctcttagcattatcggtgttttttggatctactttattaatatttgccgattaggtttaattgggataaccgttcattaccttaatttgcgaaccctgttctgggttcacgacgttataggacgtatctttttctatatctttacaattcttctatattatcaagtcttcactcattcacaattagtctcaaacttactagggcgaagcaaattagattaaaaaggaataatcatgtttgatcaaacagtattacaaatgggattctgggctacttggcttttaattcctgtcatatttgaagaaattccgatgataattaattttattcggcttcttcatcatcataaaattcgcaaaaaaacccctctgccagattttttgccagtattatcaattattattccgacttataattcatccaaaacactttatagatgccttaaatcgctagctgattcagattatcccaaaaatttactaggaattttcgttgtcgataatggcagcaaagatgacacctttcaagtctttgctaaagctcaaacggactatccacaattattgatgcggtggcttacttctcctcatggaaagtcttctgcattaaatgctgccatttataaagcaagatcccaatatatcattaatatcgatagtgacggtcggttggataaacatgctttaaacaacattgttaaaaaattctcggctaatccaaatatcgatgctttaactggaacaattttaaatgaatattttgaatattgccaaacctttctagcaggaagaaatattgaaaataacagcaatcatattttcacgctttctggtgccttttcggcttttaaacgcgagaccttaattagaacgtatctttacagtaccgatacaattagtgaagatactgacatgactttccaaatccggtacaatttaaagggaacgatttcattttgtgatgatgcaattttttattctgaaccaattagcggcttcagtgaactatatactcagcgacaacgctggcaacgcggtgaactagaagtcattaacaaatatttatcgcaagttttatcttggaaacaattcttcagtaattttcaaattcgtcgtttaatcattgatcacacagtcactttcctaaaaataatttggatgtttgctatttttatattattaggatttggctattcatggatatcattattgttttcttatgcggtaatttatcttttatatttatttttggagatttcgagttcaatttgtgtttacatatacttaggaagctttccagaagaaagaaaattttatcttaaaaatatttggatgatttttttactgcttttttataatttactttgttctttcattcgttgtgttgggattattaatgcttcaaccaccactacaacttggcaaggaattaatataattcaagaaggtcaacaggttaaccaaatcataaaaaaagatataagacaattattgaaaagaaaaaattatgacgactaaatatcatacttatatattcacaacttatttgaacgcatcacatgctattcgttggagtaaaggaatcgggcaggctcattcccatacttatgaaataaggtatagctttcatattaataacggcaaattgattcgtttcaatgaaattgaaaataagattgctgaaattataaaaaagtttaataatcaatttttaaatgaagttgagccattcaccaaagtaaatcctactttagaaaatttaaccgattatctattcaatcgtttcggcgaagaattaaataaattgaattgtagtttagatgaaatatctgtaagtgaatcaccaatgagaacttatcagatttcaattaggtaacagaggtaatagtaatgagtaagtggtataacgtttttcaacctatttatcaagtcgataaagatttaaatgtaacaatttcacattatgaaatgttattacgagatgaaaatgattccttcccaaataacgatttcttcagagtaattggaactgaagaagaaaatcaaaaatggattttagccgaaaaagagtcaatagatcaagcttttgctaagtaccctgatatctgtatcaatttaaacattgagcctattcaattcgcatacccaagcgtttggaaatttattgaaaatatttatagtaagtacgcgtggtgctagttaaatctttctagacaataagccaaattataagctaaaattgcaatttccaaccggctttgaaagcctatcagactacgtgctcgattgttctcggcattgtaataggtcagaagcgaaaagtcgctttcaattgttctgcgaatagccatcaattgatgatcattgtgctttttagctcctgtcatatttttacgatatggtgtccaaagttcataacccatttgttttagctgttgatgcagttctttgcctaaatagccttcgtcgccaagaagatagtaattagatggatgggcattttccagcagttcaactgtctccttggcatcatgaactgatgcttttgttacgacataatcaagaatgtaaccgtcatcgctaacaatggcatgaactttgaaaccatagaagtaaattttcttggtggccttataaccaatgttggcataaccgcgaaaaattttagcacgatagttgcgaattggttggcaaacaggtaccggaaagctgtcaatgatcaagaaatgtccattcaggtcaacctttttattcatttcttgccgtatctgataaatcaattgcaatagctgacgtgaacgccgattaaaacgtgagtgtgataaacaattgaaacattcacagaatcttctttgtgattcaattcctgtcttagcttgccagataagtaaagccaaaatcagactgtccgtagttttaatttgatcaatatttcgccgatgagtaaactcagccggtgcatacaaacgataccagtgccgacaaattatcactaaatctttaaaactaacttgtaaatggtggctaaaacgcttaagcttaagacagttcaatcagatcagactcttttctattattactatttacaagtcgagtctaacaagattggacttttttattaactaaaacgatttaactagcaccatgcgtatagtaagtatggtaaaaaagtggtcattgaagtaactgaacgtcaacttcaagctggaaccttaggtaataaacaatttgataaatctttccaaagattccatgatattggcttggacgttgttttagacgatgttgattctggtggtcatagctttacttttgtagatcaccattctgatataatcagtgggatcaaattatcattactagacttcgatcctattagttctgatactactattaaatttattgatgcttgggctagctttgctaaggaaaaacacttagatctagttgtagaagctatcagaaataaggaaattgctcaaaaatttgctggtaataaacatattttccagcaaggttattactggcaacagggagtaaaactagaagacttaccaacggtttatggatttaagaagtaattacaaaaagacagaattgattgcttaattctgtctttttttacatgtatttatttaaaaatttgtttattcgcattttatattcatgcggataagtttcgaatgaacgcgcatgagctgcacttttggcaatccataactccttaggaccatttgtagcatgatagttttgatacaccattttagttggcacaaaattatcttttccaccatggataaatagcattggcttagtattcttttttaattgcttaactgcagatgcatcccctaaataaaagccaagatttgctttacttacaccgcttaatagcgtaactgcacttgtagctactgcttgcggcataccgtataaatcttttgcttcatgcatgaattcagctttcacatcactatacccacagtcttcaatatatgccttaacttgcttaggcatcttgaggccactagtcatcattgttgttgctccgcccatactgacgccaaaaattacaatctgttgttttcttccttcaattgataaatctttattgacccattttctaacgtcatatttttcaggccaaccatagccaatatacttcccttgactttgtccatgagcacgcgcatcaggaatcaaaacattatatcccaattgatgaaacatcgccgcatagggtgccatggtatttttattattaccaaatccatgcagcaacacagcagtcttttcagaatgcttatttggaatataatttgcatctaagcggtagtttgaagaagcagacttaatataccaatgctcttttttagcgtttttataccactttttattctgcgcaagtgaatctttctttttcttgctagaatatttattcagcactgtcttttcacctggaacaaaagcaacattaaagaaatatgcttcaactgctccaattaaaacgattaaaactgtggcgactatccctattatccaccatacttttttgcgttttctattcaaaatgtcaactcctatataaaataatatagaattaattatacacttttgaattttatatggtatattgacattttaagtaaaatattgcctatacaaaaaatgatggcttacgccatcattttttgttattaatctaaatcttcaccgtgagattcaattaccttcttgtaccagtaaaatgaatccttaggcattctcttaagagtacctttaccttcatcatcacgatcaacatagataaaaccgtaacgcttagacatttgaccggtaccagctgatacttcatcaatacagccccaagtagtgtaggcacggacatcaacgccatcttcgatcgcacgattcattgccttaatgtgcattctaaggtaatcaatgcggtaatcgtcatgaatcttaccatcatcactaatcttatcaacggcacctagaccattttcaactaccatcattgggatttcgtaacggtcatacataacttcaaggtagtattgcaagccatctggatcagttgcccaaccccattctgaatacttaaggtatggattcttagcaccagcggcgaagttaccgccaaccttatcttttacttcatgagttgtgataacgttgctcatgtagtaagaaaaggtgtacatatcaactttaccttccaacatatccttcttatcttgctcagtaatgtctaagtgaacattgtgttctttccaaagacgcttagcaaatgttggatacttacccttgcattgtgcatccccacagtagaaaatattttgttcccacatatggcggttagtcaaaatatcctttggatctggggttaatgggtaatcaacgattccacaaatcatattccctaccacataatcaggatcaatttcatgagccaacttaactgcccgagcactagctacgaattgatagtgcaatttctgatatgcatgttggtatgccttatcatcagtcacattattgccaaaagcactaagcatcaacagggttgaattgatttcgttaaaagtaagccagtacttaactaatcccttgtattcttcaaacaaagtcttagcatatttcacatacatatcgatcattttacgatcttgccagtcatgatatttttcactgaggtaaagtggatcttcatagtgagaaatagtaactaaaggttcaatatcatattttttacattcttcaaatactctgcgataaaagtcaagtccagcttgatttggcttttcctcatcacccttagggaagatccgagtccaagcaattgataaacggaaggttttgaaacccatgtccgcaaacatcttaatatcatctttgtaatggtgataaaaatcaatcgctacatggttaggataatattcattaggatcaattgcaccaactgccccttcaggaagtcccgcacctggaactcctggtgttttttctaacttaccatttaacttgtaagtcaacattctaggtgcatctaagctacctgcagtagtaatatctgttactgataggcctttaccatcttcatcatatgcaccttcgatttggttagcggcagttgctccgccccataaaaagttctttggaaatgacattatgattctccttttctgaaagcatttacattaattatagactaattggtttgaacttgaccagttgttttaacttctgcgttactgccttgcaaagacaaaatttcttgaccaactttaacttcaccttgagctacttgctgtacagattcatatttcttagaattcgtaacaacaactggagtagtcacttcatagccagcagccttaatttctttaatattaaatttaaccaatggatcacctgctttaacctcttgacctttttctactaaagtcttgaagcccttaccttgcagattaacggtatccattccaatgtgcattaacacttctgcgccatctgtagtgttaagtccgacagcgtgtcctgttgggaaaactaaagcaatcttaccatcagctggggcatgaagcacaccttcgcttggttcaatagcaacgccttcccccattgcaccgcttgagaatacttcatctttaatttctgacaatggttttacttcaccgtctaatggtgaaactaatttggttgaaggattttccttttcttcacttaaaattgcttgtacaggagcactcttagtaatattagctgcttcattagcggcgtcagcaactttttgtgcttgttttttattatattcagcatcaactgattttttaccaaagagcatttgaagtgcaaaaccagctataaatgctacaataccggcaataattacgccgacaattgttgtcattgatcctcccttaggattaatgtaggccggaattgcaaagaatcccattgatggcataatgtacaatactgaatgaaaggcaccaatgattgcacctgagactgcaccagcaatacagcttaaaacaaatggcgtttttcttggtaatgtaataccataaattgctggttcagtaacaccgaacagtcctgagaaaaatgcaccagtagctgtttctttaagttttttgtccttagtttgacggataatagctaaaacaacaccaatttgcgcataacaaaccatgcaggataaacctagaattgggtcataacctaatgcggctaaatctgcagtagttacggcaacgattccccagtgaacaccgaaaataacaagtacttgccaaagagcacccattaataaaccagcaataattggactaaagttgtaaacacctgacatcactgcaccaattgcgtccccaacccaagtcattacaggaccaattactataaatgcaactggtaaagcaataatcatagtgacaactggaaccaagaacatttgcacaactgatggaatccactttttagcccagtgctcaataattgaagcaaaccaaacggtaaataatactggtaaaactgtagaagtataattcatcgtgataaccggaatgccaaagaaagtcgtgtgaatctctgaggcaaaagccgttcctttaaacaatgtacctagaacagtcttacttgcagctaattgaaccatagttggataagttaaggttgcaccaattgctaatccgataaattgattcatgtgaaatctacgtgctgcagttacccctaagaatactggtaagaagtagaaaatactatcaccaattgcatatagaatttggtaagtacccgatttagtagaaagccatcccattgcgcctactaaaactactaggcctttaataataccgccagcactaagtggagctagaatatctgtaaaaatgcctgaaatcaaagcaacggctttatccacaaagctagaattatcttcaacgtcatcatcaggaacttgtccaccgccattaaagccgccttctttgacaacagcatcgtaaacatcagcaacttcattaccaatgaccacttgatactgaccaccagctttaacaacagttacaacaccatctgtatcttttaaaacatcatcgttagcctttttttcatcctttaatttaaaacgcaaacgagttgcacagtgaacaacactggtcacattatctttgccaccaacattttgaatgatggtcttggctaattcatcatagttcttagccatttgcctttcctccttaaaataaaaacccaagctactcaaaaactaaagaacataaatgttcaacgtctttcagtaactcgggttcatgcctaatcttcttagtaacatacctaagtaacttagatatttaattatcttgacgactagttacgcgccaaatatgtaaaacaagataaaattcatcatctgaatctaaatcccatcccatttttgcatgtaagtaagtggtgatccgctccgccgtctcatacgctttgctatatttgattttcataaaacctagcattgcaggatcaagtgaagcctcctccttttgcttatttcgtaaaaatctaactaacaaaatgcgcaaatgcgaaacaaacctactatagttaaaggagctcgtatcaagttgcattgaatattgcaattgaataatatcgattatcccacgaatcaaatttgtaatctgaattgtttcttgtacttgagaaacatcactcttagcattaaccaggtgataggtcatcaaaaccgactcactctgcggcaatttaatctgcatctcctgattaattagattgaccacttttttagctgccgcaaattcttttggaaaaagattttgaacttcccaactattgttagcgggagctatatcaatatgatctttaattcgcgtaactgcaaaatcaatgtgatctgctaaagcaagatactgaaagtcattgaacttaatctgaagcagaggttcgaccagctgaagtaccttattagttacttcaattgttttagggtcaaagcccttaacttgatccacttcgtctttagtaacgaagcgacgttcaattttgctttcatcaacaggatcacttttttttagaccaaatcctacgcccttgcctaggactatttcttcttgaccttggttattttcaattaaggcagcactattattaaatgttttaagaaatttcataataattcaccaccttagcaaaaaaagaaaaagctatcacaaataatgatataccaacgcaacattatttgtaatagctaagacctgatcgtatcagtaatccgctcacttacagttattataatagccaacattgtaagcggtgtcaatataattttgtgaaaaaatgcaaaatattttacaatgaactaaaaagcgaggtaattaaaatgaaattcgttcttgcacctgattcatttaaagaaagcatgacagcaaaagaagtctgcattgcaatgaaaaatggtattcaaaaagttattcccaatgcacaaataaccgcagtaccaatggctgatggcggcgaaggtacaactgattcattggttgacgctacaggcgggcaaaaataccaaataaatgttaccggtccgcttaatcaaaaagtatcagcttattatggcatctcaggtgatggacaaactgcaatcatcgaaatggcacaagctagtggtctctcttatgttgcaaaaagtaaacgaactcccgaaacaattttaaagactacaacttatggaaccggcgaattaattaacgcagctttgaagcaccacgttaaaaagattatcatcggcctgggcggaagcagcacaaatgatggcggtgctggtatggcacaagcacttggtgttaaattttttgatcaaaatcatcatgaaatcacccaaaagctagcaggcggtgctttagatcaaattgtcaatattgatctttcttcaattaatcctcgtattaaagatacccaatttttattagccagtgacgtaaccaatcctctaactggacctaatggtgcaagtagcgtcttcggcccacaaaaaggcgcagatgatacaactgttaaaattctagatcaaaatttatctcactatgcacaagtaattgagcagactattgataaaaacgtcgcccaaatttctggtagtggtgctgctggcggcctaggcgctggcctgatcgcctttactaacgccagtattcatccaggcgtgcaattaattgcccaagaaactaagcttgaagccaagatcaaagacgctgactatgtttttaccggcgaaggcggaactgattttcaaactaagtttggtaaaacaccctttggtgttgctaaaattgctaaaaaatatcacattcctgttatttctttagcaggctatttagatcaaggtattgatcaactctatgatgaaggatttaccgctatatttggcattcttgctaaagcagaagatattgagcaagccctaaaagatggaccaataaatgttacccgtacaactgaaaatattgttcgtttaatcgcacaaaaataagatgagctcgatgcccatcttattttatttcgttaatttcttaattaagccttcacagccacgataaatttcattatacgctgtttcaaaatcatttgtataccaaggatcatcgacatcagcataagagccagcaaactctaaaattttatgttctttatgctctgggtctccaccagtaatgcgattcatatctgcgaaattttcttcatccatgcagattaaatattcataattatcatagtctgagcgagtcatttgactagcacgatgaccacgatcatatggaatatgttttgcaactaattcccgttgtgcacgagcatcaatcccatgacctaaagcatcctgcgtagttgctttagattcagcagtatattgatctgctaggttattttcttttaacaaatattgcatcacggcctctgccattggtgagcggcaaatattgccatgacaaacaaacagaatttttttcattaccttttcttcctcttagttagtctatttataaccggccaaataatcgccgtaataactccaactgttaagccaacccaaatctcctgcgacaaagttacaagaatgccactataaactcgactttgcaatgcggtcatcgcctcatttgaggcaagccacaatgccacaaatgaagcaatagtagctagtgctagtggaattgacgccgaagagcgaccaaataaaatcaaaattgcggctaacaaaaataacaaagccactgcaaaaattgaatactcataaattgtaataatatggttcacatcttctgaatcttccttcaatttatgattaatttgcttgactaaatattcattgataatttcttccaacttacttttactagttaagcctaaatctttagtggtcaattttccctgatcattatatttttcacacaatctatatagatcagcatatgataagttaacttgatatttcggcggcaattgttctaacaatgtcttttccaaaccagatgcttcgagtaactcaacccctgccttcaaattaggattatctgagtcatccactactcgattgattacttctttgcccatcgcctgtgtatcgtttatttttaaattcacattgctagtcattaataaccaaaaagatactgcggctaggccgaccattatcaaacgtagtattattttgacgatgttcttcatctaaaaatcttcccctaacatctacttttttcagatggcaaacaattgcaaggcaccatgtcaggagcatccttttctttcaatttaagttcttgctgcatcgtcttaatatcgcccttagaaagcggtgcttcttttagcaactgaattaatacctcacccttgtgcatatcacacatgttttgcatcatatgtaaagtaacttcagacatcattttgcgctgactaatagtcggcttataaacaaaacaccggccttctttacgcgtctttagcaagcccttttgcactaaacgccgcattagcgttttaattgtggaatcggaccaatcctttttaccttgtagttctttgattacttggccagtacgaacttctcctaaggtccaaataatacgcataacttcccattctgattgggtaatggaattacgatcgtctttagtttctgccataaaacatcacttctaaatccaaattttttactaaagaacaaattttttcaaagcctttgcaatcccgttgtgatcattatcatcagtaacataatcagccttatctttgatctcactaatggcgttacccatcgctactttcatgaagttgggattagaaaacatcgaaagatcattgccttgatcaccaaaaatcatcacgtctttttgggcaatttttagccgtgaagccaaatccattaaagcattaccttttgaagctcccaaggcatttaattcaataatactgtcaaaactgcgaacaatgtcataagtctgaaaagcccagtcggggaaactattccacagtttttctacctggtcagctccttcagttgaagtaaaaccgactttgttaaaagtaaaatcttttggaatttcttttcggtctctaactttcataatattatcggtcaaagccgcattaatttgcatttgcacagataaatcccgatcagttgtaatgaaatacttagtcgtctcaaaatgtacatttacatgacttaaacgctgaaaacgcaacatattattgaagtcttgataattcaattcctgactcattaaaacacgaccagaaattgtttgaattactgcaccattaaagacgattgcatattgatcatcaccttcaattcctaattgcttagcaaagttcaatactcctgataatggtcgtccagtagctaaaacaaccttaatcccattttgtactgcgacacgcaacattctttgcgtttctggcaaaatagtattattgcttgataataaagttccatctaaatcaaccgcgatcaatttaatagccattttaatccctcggatcttaaaaattacatctagcattaattatacaaaaagccgtgatttaactcacgactttttacttatcgattattcaattaggattttacttacccatttccttttcgaccactttaacgatacggtctacataggcatcagtttcttcttgagttggtccttcagccattactctaagcaagtcttgagtacctgatggacgaacaagtacacgaccatttccagccatatccttttccactgcagcaatttcatcaagaattggttggtgttctttccagctcttcttgtcagcaaccggaacattaactaggcattgtgggtaatctttaaagtctttcaaaagttcacttaatgacttaccagtcttcttcattacgagcattaaatgcaaaccggttaacataccatcaccagtattatgataatcactcataataacgtgacctgattgttcgccacctagattgtagccgtgagcacgcatttcttcagaaacgtaacggtcaccaacttgggtacgaacattcttcaagccttctttttcaagagccttagtaaaaccaagattactcattacagtagtaacaatggtatctttcttcaaacgaccatgttctgccaagtatgagccgagtacgtacatgatgtggtcaccatcaacttcattaccattttcatcaacagcaatgcaacggtcagcatccccatcaaaggctaaaccaagttgagcaccttgcttaacaacttcttcttgtaacttttcagtatgcgttgcaccaacatgatcgttaatgttcaaaccatctgggtgagttgcaatagtagtaaagtcaacgccacaatcagcaaacagtcttgagatcaatgcgcttgaagcaccgctagctccatcaataactaccttaattccacccaagtcttctggaatagtattttcaataaattgcaagtatttagctgaaccttcgtggaagtcagttacagtacctaatcccttagcagatggacgaggtaatttatcttccttagcgtcaattaatttttcaatttcgccttccatttcatctgaaagcttcaaaccatcgctaccaaagaacttaatcccattatcttctacagggttgtgtgaagctgaaatttgcacccctgcatcggcgccttgtgctcgtactaagtatgaaagacctggagtagtaattacgccaacctcaagcacttcaatcccaactgaaagaaggcctgaaatcaaggcatattcaagcatttggcctgaaatacgagtatcacgagatactaataccttagcttgttcgccgtcttttttgttcttagttaaaacataaccaccatcacgacctaatttaaaagccatttctggagttaagccttgattagctacgccacgaacaccatcagttccgaaatattttaacatttaataaacaacctttctcaaattaattattcgcattctttactttaattgatatctgtacattttcaggatcaacgcgagcaactcccttaggtaaaactaaagggtaattctttacagttgaatatgagattcctttcagatctacatcaacatccaactgcttaatctttgctaatgtttccttttgtccatacagtgttacctcatcattcttggcagtaaccgaatagactttattatttttttcatttttaggctttaaatttagcttaactttctttttgaaaagcgatattggcaaactagcttttactgtagatggattaatcactgcatttaattgacgcccttttttatcttcagctatcaaaataacttgacgctcataatcatgattaatgccattaggtaaaggcaacttggcaacgatctgatcaatctgatttacttcgcttctagcaccagtaacctcaacttgctgcggatcaacactagccgtaccaatattatatccattagcaacagcatttttattatactctatttgaacgggcatggtacgagattttcgccgttcaatatcaacattaactgttgccgggttaatcgtgtaagataattgactatttagtcccgtaacttctacctttacggtttgcttacctattttcttatgagttagatcaatataagcacggaagctttgagtattaacagtcgaagtaaccaacgcattcgaaccctccaaagttatcttaaccttttcaggataaccaacaacatagtatttatctgtattaaccgaaacttgcagaggaacactaattgtctgcgtttcattagcagtttgccgtgtcttcttagattcaccctgtgtaacaaaacctgtttgagtagagtcaatgtaaaccactaataagatcgcaaacagcaatgagattattctgattacccagcgtttatcccaaaagtctttcatcgatctgcaccccatttccagactttattaatcacacgacgaatccatggaaccttcttctcttccttaggaacaagttgagcattcaaatacttcaaatattcttcacgagacaaatctactaaaaagcgcccgtttctagtaatagttacgccaccagtttcctctgagacgacgatcgttaccgcatcggtaacttcagaaataccaacggcagctctgtgacgcgtgcctaaacgcttaggaatcatgctgttatctgacagtggtaaatatgctgctgcaacagcaattcgattattattgataattaccgcaccatcgtgcaacggcgtattagggataaaaatattaattaataattcaccagaaatatccgcatccagcttgattccagtttcaatataatcatctagccccgtatcttgttgaatcgtgattaaggcaccaattcttcttttagacatgtattgaatcgctttatcgagctcctgcaccatcttaaccgactgtgtatgagcactctcacctcggccattaaaaatcggcgtgcgtcctagccgctctagtccacgacgaatttccggctggaaaataacgataattccgattactgcccaagaaacaatttggtccacaatataagttaccgcatgcagttgcagtaagccggcaataattctaacaataaagataaagacgatcccttttgccagttgtactgctttggtaccacgaatcatcatgatcaaacggtaaactaaataccaaatgattaaaatatctaaagcaatggagaaattattccaagtaaacagattagaaatattaaaatgcattgattgctcctttcttctttaattataaccgccccaatttaccgtgcatacattttaaattctaaaaataggtcattatattcttgggtcttcttaggacctaaatctctaaagacctgtagattcttcaacgtactttgagtaggataaaactgccggtcatctctaacttttttcggcaataatttttgggctgcggtatttggggttgcatatccaacatattccgcattttgcgctgcatttttaggttcaagcataaaattaataaacttaagtgcagcttttttattttgtacagttttaggaataacaaaattatcaaaccacaaatttgatccttgcttaggcacaacataatgcaagtgaggattttgttccatcatttcataagcctcaccagaccaggtaacgccaattgctgcctcattttgcactaggtacatcttcatttcatctgaaataatcgccttaatattgggtcccagactattaagcttagtttgtgccaaatgtagtttaatactagatgtggtattcattgaatatcctaaagaaaccaatgccatccccattgcatccctagctgaatcaactagtaaaatttgcctgcgatactttttactccacaggtcattccaagtcttaattgcccctggcttgacgaatttatcattataaacaattcctagtgtcccccagaaatatggcacagaataatcattattttgatcaaatgacttatgtaaaaaactcttgccaatatatttcaaattaggaatttgcttttgatccaactgatcaagcaaatgagccttgcgcattttagttaccatatactcagaaggaatggtcaaatcatatgccgttccgccttgtttgattttggtatacatcgcttcattggaatcaaaggtctcatagacaacatgataacctgtctgcttttcaaacttttttattaactttggatctagatagtcgccccagttatagataatcaagttttgtttatttttcccggtagacgatttctccaaatgatgggataaaccccaaaggcctgcacaggcaattaaaatagctgcaattgccatcataatctttttcatttaactaggcctcccatcacacgatgatttttctttctgccctttttagtagtaataaaataatagattcctacaagcaacaagacaaaaatgaacattacggtacttaaagcattaatctcaagatcgattccttgtcgtgcccgagaataaatttcaactgaaagagttgaaaaaccattcccagtaacgaaaaaagttacggcaaaatcatctagtgaataggtcaacgccataaataaaccggaaaagatgcctggcataataactggaattaaaacatcactaaaaacctgccatgaattcgcccctaaatcacgtgctgcatcaataagcgacatatccatttcattaagtcgcggcaagaccatcaaaaccacaatcggaatagaaaaggcaatatgacttaacaatacagaaccaaaatttaagccaattcccaatgctgtaaaaaagatcaaaaaactagcaccaataattacatcaggtgacaccatcaagacattgtttaatgctaaggttgttttcttattagattcttttttcatcgcagcaattgcaattgcaccaaatgtcccaataattgttgctattaaactggacaacagcgctagtaggatagtttccaaaaatatcgctaataagcgattatcttgaaataaagtctgataatgagcccatgtaaagtgctcaaatttattcatgtttttaccactagaaaatgaaaagtaaatcaaataaaaaatgggtacatataataggatcaaagtaaaagcaagatagatcttagcgattaaatgtctgtttctcataaatctaccttctttcttctagcctttttgctagtaatcaacatgactaccaccatcagcgcgattaaaattactccaattgtggcccccatattccagttcattgtggtcataaaatactcttcgatagcagtccctaatgtgattacccgattgccgccgatcagccttgttaacataaataatgacaatgatgggataaagatggcctgaacgccgctttcaactcctggacgagaaagcggccataaaacatagcgaaaagtttgccatttactagcacccaaatcctcagaggcatgaatgactgcaggattaatctctttaatcgcattaaaaattggcaaaatcataaacggaatttcaatgtaagtcgccacaaaaataaaagcaaaatcagtaaacaaaatatttacgggaccaataccaaataaatgtaaaaatttatttactaaaccgtcattacctaaaatgccaataaatgcatatgctttaagcagcaaattaatccatgttggcaaaatgatcaataacagccacagctgctggtttttcattttaattaaaaaatacgctgccggatacgaaattaccaacgtcaacaaggtgatcaaaaatgcataccaaaatgagttaagcatcatttttaaaaaggtaccatttttaaaaaattcaacgtaatttctgagcgtgaatgcgttattactatcagtaaacgaataccagagaatcaataaaatcggcaaaatgacaaagagaataatccacagcagatatggaatcataaaaaacatctttttatttttcattttcatccgcctcatacttttctagtcgagcatcaaaatcgtgttggctttcatttaaccgcatgacgtgaatatcttctggatcaaaaaagagcccaacacgttgtcccaatttaactccattagtagaatggatcagccattcattttcattggcatcaattgccttaatctcaaagtgatcacctaaaaataattgcgtctgtgctgtaaccacaatcttcccatcttctggtttaacaatatccaagtcttcgggacgaataactacttcaaccttttcattaggcttcatcccaccatcggcacatttaaatttattattagcaaattccacttcgtaatcatgaatcattcgaccagataaaatattggagtcaccaataaaacgtgctacaaagtcattcactggctcatcgtaaattgctaccggattaccactttgttgaatctgcccatcatttaaaacaaaaatttcatcactcattgatagagcttcttcttgatcgtgcgtaacaaaaataaaggtaatgcctagctttttctgaattgcccgtaattcaaattgcatgtcttttcgtaaacgtttatccaaagcagatagcgactcatctaatagtaaaaccttaggttcattaacaattgcccgggcaatagctacacgctgctgctgtcctccactaagttccgaaatttcgcggttagcgtaaccgtctagacgaaccatatgcaaagcatctttaacagctggcttgatttcactcattggtcttttcttaattttcaagccaaacgccacattttgaaaaacatccaggtgtggaaacaaagcataattttgaaaaactgtattgatatgtctttttgaagcatcaaggtcagtaatatcattaccatcaaagaggacttgaccactagatggctgagtaaagccagcaataattcgcaaaattgtcgattttcccgagccactaggaccaagtagtgaataaaatttaccagattcaatagttaaatttatatcttttaatgctacaaacccatcatcatattttttggtgatgtgttttagtttgataatatccatttccatccctcacataaaaaacagctgcaagccttccagcctgtagcttgtctttgctaaaatattttacttttctttgccgataatcctaacttctgtgcgtaagtcaatgtcaaacttttctttaattaccttttggatcaaatgaattaaattcaaataatctgttgcagtagcaccgcctttattcacgataaaacctgcatgtttcattgaatcttgagcgccaccgatttgtttaccttgtaaaccagctttaataatcatcggaccaacaaagtgcccagtaggccgcttaaagacactgccacaagatggatattcaagtggctgcttataacgacgtaaagcatttaaataatgcatatgatctaagatctctaacttatcgcctgacttgagtgcaaaagtggcgcttaatacaatatcgccattttcttgaactaatgaatgccggtaagaaaagttcatttctgcgtttgaatatgttttaaattctcctgctctggttaaaacattaacgctttgcactacttcttgcatctcaccgccataggcaccagcattcataaaaataccaccgccaatactaccaggaattccagcagcaaattccattccgctcaaaccatgatgagcagccgcaaaagctgtatcgataatccgtgcaccagcatcagctgtaacttgattatcttctactttaatctcttttaattcagtcaaaataattactaacccatcaattccgccgtcacggatgattaaatttgaggcattgccaataattgttaatggaatttcattttcacgtgtgacttttactaattgttctacttcatcagtcgtcttaggaaaggccaaatattcagctggtccacctgtcttagtaaaagtatatctgcttaatgggatttgctctttaatatcaatccctttttctttcaaatcaagtaattccacgctgttgcctccttaaagtttcttgttttattttaccgcataaaggcgttagcttcattaatattaatgatatacttttttaaaaggagaattttatgaattttattgcaatggactttgaaacagccaaccattatccagaaagtgcctgttcacttgctttggtaatggtgagaaataataaaattgttgatcgcttttatacagtaattaatcctcaaatgccatttgacgcgcgaaatattcaagtacatcaaattacagctgaggacgttaaaaacgctccaacaatggcagaggtctggccccacattaaagaattgtatcaaccaggaatgcttgtagccgcacataacgctcgctttgatactaatgtcatgcggcaaagcctggcacgttacggtattgaggagccccactatttggtcattgacactttagctagcagtaaattactcgaaccagaactgcctgaccacaaattagacacagtttctgaggccttaaacgttgaattgtggcaccaccataacgcattaagtgatagtgaagcatgtgctgggattttaatcaagcaagaagagcaatttggtgatgaagcaatcaaaaatttggtttatcagatatgaaaaatctctaggaattttgatcctagagatttttgctttacttattaaattcagttaacgcagctttgacccattcttcattgcgcttaccatgaggagtaaattcaacaacccgtttagttgaatcccaactatcgtccactctggtaatcgtaagttgcaaatactcatctggcaaatcattcattactagttgtggccattcaattaccactaaacctggttctgctaaatagccctccaaatcaatcgaggataaatcatcattttccaaacgataaaagtccatatgaaagagcggcaacttagcttctcgatattcacgcacaatggtgaatgtaggactcttaacaggccgatgtatgcctaatgctcgccctaatccttgagtcatggttgtcttgcctgcacccaaatcaccatttaatagtaataaatcgtagggctgggccgttttggctagggatgcacctaatttctgcattccatcagcagaattaatttctaactttgtcattacttttcatcctttgctaaagcttgtgcggcagtaacaattgctaaatcataaatatcttgttcactgcagcctcgagataggtcattcactggagctgctaaaccttgcaaaattggaccaacagcagtgaagccacctaatctttgaaccatcttataaccgatattgcctgattgtaattctgggaaaacaaagacattcgcatgtccagctacctttgagtttggagccttcttttcactaactgcaggtacaaaagcggcatcaaattgcaattcaccatcagctggaatttctggatgatccttttggaacatagctgctgcatcatgtaccttatcaaccattggtccttcggctgaacccttagttgaaaagctcaaaaatgcgaccttaggatcaatttcggccatcttggcagtcagagcagattgatagccaatttcagctaaagtttcttcatcaggattaatgttgatggcacagtcggcaaaaatgtaacgctcatcgcccttttccattacgaaagcgccggatactcgatgcatccccttagctgcatgaattaattgtaaagctggcaaaacagtgttagccgttgagtgagcagcaccggaaaccataccgtctgcttttcccatcttcaccaacatggtaccaaagtaattaccttgggctaacttgagctttgcttcagcaatactggtatcttttcgtctagctttaacaaattccgctgccatttgatcaagttcatcataatgattgaggtcatagatcttaacaccagctaagtctaaattattttctttaactaacttagcaatctcatctggatttccaattaaaattggttcgataatgccatcttttttcaaattagctatggcagtaagaattcttaaatcatcgccttctggaaaaacaattcttttcttatcttttgctgcttcaacttgttttttgaataatgaaaatacgctcattttttacctcttatgctaaatcagatttacttatcgtttctggcaattgccagtcaatcggcgtttcatcaaagttcttcaatgccatattacaccgcgaaaacggtcgcgagccaaagaaccctcgatcagccgaaaatggacttggatgtgatgatttaatgataaaattcttactttgatcaattaatggaatcttgttttgagcaaatcgaccccacaaaataaagacgacttttccacgctcactcagagccttaattgcagtatcagtcacatcttcccaacctttgccttggtgaccgttagcatgcccatacggtaccgtcaaaaccgcattcagcaaaagcacaccttgatcggcccacttttttaagtaaccgtgattaacaggccgagctccgacatcatcatagagttccttatagatatttttaagtgatggcggcaaagttgtacctggcatgacggaaaaactcattccattagcttgaccaggattatgatatggatcttgacccaaaattaccactttagttttagcaaacggtgttaatttaaaagccgtaaaaatatgatacatatcaggataaatttgtttagtagaatattcttcttttaaaaaattatgcaattcgtgatatttctcacttgcaaaaacaggatccaatacttgatcccaatcgttgccaattaattctttagccaagtcttacaccctcttttcttctcctctttatggtatcattaatttaatactaaatgggagagaaattatgatcaaattagttgcttgtgatcttgacggcacgttgtttaattcagagatggctgtttctgctgctaatgcaaaagctgtgaaaaatgcacaaagtagcggcattgaatttttaattgcgactggccgggccccacgcgaatcacgttcagttctcaaagatgctgatttgcataccagttttatcaatcttaatggtgccctggtttttgacgaaaatgagcaattaatgatcaaacacagtattcccaaggcaaaagcacaacagctagtgcatttactacatcgatcaggcttttactttgaaattttaactgccaatcaggtttatagtgaaaatctagatcaacgtatttcaaatgtagctcatttaatggtagatctaaatcctctacttgattttcgtcaagctgtagcaatttctgctggtaataagactattatgaatatgaaacaaatccacagtttcgataatttattgcaagatcctaaaatagaagtaatgaaaattattgcttttgactctcggggacatgaagcttttaccgatatcaaaaaagaaatcgctacaatgggcgatctagtagtaacttcaagttcatcttctaatattgaaatcaatgagcaacatgctcaaaaaggtcttgccttacttgattatgccaagttaaaaggtatcgagcctgaggaaatcgctgcaatcggtgataatttaaatgatgagagtatgatccgagcagcaggtactggcgttgcgatgggtaatgcgattccagctattaagaaaatagctcaggtagtcaccaagcgaaacaatgaagatggagtagcttatattttaaataaatttattgcagataataacaatatttaaagttatgaggtgagtaagtatgcgattttggctagaacttaatcaggaaaaggattacggtcaaattcctgtgcttaatcaaaatggaaaagctgaattttttattcaaggcaatcttgataatccaaaccacactttatatctaaataatttccgtaaacaggaagtgggacgtctgttttctgatggtgcgggcctaattgcttcgttcacaattgatgtcgtcaaccactctttagtaggcgtaaaaaagttaaacacacctactgcaaacatattctatttgacccaattaaagtatattgttacaggtagtattaaacgtggtacttatacttttcgttctggaatcaagagtgtagcaagtgtccaaacaatcatgggagatcgcggaggcgttttaatttgtgatattactaagcctgaagacgtcccctttattcttttgacatccgttctatttacacaatggcatgttacgcctttgaaactgcctagttttccgccaattggatttgaggtaaatccaaattaaacaaaaaagcagtcatgaaaattttcataactgctcttctagaaagtgatatagatatagatgtatcttctgccataaagtttatatttattaagtaataaggaattattaggcagagactgaataatgaaagttaaatctaatttgattcaacctccatagcttattatacttcgttcagccaaaaatacaagggctagatgttattattttactttaaagatagctaaataatgcatttagagctagcttatagcttaataatttgttatttaacttagtacatctatttttctaaacaagacaactttaatttctacgtaaattgcaataataaattgaacacttttaatcaagctgcttgatagattagatctaattctctttcaaagatttcatctggtgtatgatatgccaatatctttcttggtaaagagttgcaccaggtttcaatgtctatgatgtcttgtagtgaataattgtctattgcctctcccttaggaataaatctgcgaatgagtccattatgtctttcaacggttcccttgtcacaagatgtataaggatgagcatagtaaactaaagtatttgatacgtcttctaagcttgaaagatctgcaaactctgagccattatcagtggtaatggttttaaaaatatcattccaatgttcgctgtattgcctttggagttctttaaaggcctgcatgacactgacagaagtcttgtcaggaatacgaagaattaagaactcacgactcatacgttcagataaggttagcagcacctcatcatctttgctcttatgtccgagaactaaatcgcattcccaatggccaaactcattacgtttattgatttctttaggacgttcttcaatgcttctgccaagttttttcttatttctgcgaatacgatgaagcttggtattgcgtttaagcttctctggcaagtcgtaattatgtatatctaatagaccttggtcgacataattgtaaagagtcttagtacagacaacatctctgctgctaaatgcgccaacagcggtggcgcgattactgcacacatcaagcgaccagccgtctttaaagaaatgtttgtggacatagcgcatgaattgagttttcctgagaaagtctgatttacgtccacaatttttacgatgagcttgatatgcatcatgcccttgagtagccttatatcttttgactttgccatgatacagttctacagtaccgcgcttaacctcataactgatagtagaaggggaacagtttaattcacgggcaatggcacgcaaagaatagccatctttcaaacgcaattgaataataactctttcctcgaatgataaatgcttgcctttaatgtgatgattcatggtagaatgtaaagagtccattttgacctcgtttctaaatgttgtgtggtaactacattctatcaaacaggtccgaatggactttttattttttattaagtgttcaatttaattttacaatcagcgactttaatttctattaaaaaatatagtgaaatgatcaagtgatttatcaatggcttgatcatttttatttactttatcaacgaacttgtttttagctatcaaactatataaaaaagagccaaatctaatgatttgaccctaaaaattctagattattaatctaaattattttttatgaattagtcttggtagtttaccaattctaagaatgattctggtactaatgaagcaccaccaaccaagccaccgtcaatatcaggcttagccattaattccttaacgttagctggttttacagaaccaccgtattgaatacgaacgttttctgcagtttcttcgttgtacaagtccttaacagtttcacgaatagtcttgcacatttcttcagcttgatctgatgaagcagtcttaccagtaccgatagcccagattggttcgtaggcaataacaagtgaagatacttgttcagcagttaagccgtctaaagcagccttaatttgagcaactacccagtcttcttgcttgttagcttcacgagtttcaagtgattcaccacagcaaatgattggcttcaagccattagcaaagattgccttagccttcttgttaatgtcttcgtcagtttcgtggaagtaaccacgacgttctgagtgaccaataattacgtagtccatacccatttctttcaagaccttaggtgaagtttcaccagtgtaagcaccttcgtcttcaaagtaacagttttctgcaccgatatgtaagtttgagccttcagcagcttttctcaaagcgtcaaggtcaactgcaggtgcacaaataagtgattcaaccttacttgggtctggtaacttatccttaacagcgttaacgaattcagtagtttgttctggattcatatgtaacttccagttaccagcaataattggtgtacgactcattaatctattgtcctttccttactattacttgtctgaaacgcaagcgatacctggcaattccttaccttcaaggtagttaagtgaagcaccaccaccggtagaaatgtgggtaatcttaggagcaatgcctaattgcttagcagcagcagttgagtcaccaccaccgatgatagtagttgcatccttaaggtctgccaatgcacgaccaacttccaaagtaccttcagcgaagttaggcatttcgaatgcacccattgggccgttccaaacaacagtcttagcatccttcaagatttccttgaacttttcaacagtcttaggaccgatgtcaagacccatcatgttgtcaggaatatcatcaccaacaacttcacgtgaagcatcatttgagaattcagttgcggctacgttatctacaggaagaacgatcttgtcgccagccttagcaagtaattccttagcaaggtctaccttgtcagcttcaaataatgatttaccaatgctgtggccttgagctgctaagaatgtgtaagccataccaccaccgattaaaatatggtctgacttaggaattaagttttcgataacaccaatcttgtctgaaaccttagcaccaccaagaatagttacgaatgggtgtactgggttttcaacagcatcacctaagaacttgatttccttttcaagcaagtaaccagctgctgcaggcttgccagcttccttcatagcagttgcgataccaacgtttgaagcgtgacttctgtgagcagtaccaaatgcatcatttacaaacatgtcgccaagacttgcccagtattcgccaagcttaggatcgttacctgattcacgcttaccaaagtcgttgtcgatgtcttggaatctagtgttttcaagaacgataacatctccatccttcatgttgttgatagcgtcttcaacttctttaccttcgtttgatggtacaaaagttacaggcttcttaagaagttcacttaaacgttcagcaactggctttaatgataattccttcttgtcagcatctgacttaacacgacctaagtggctaagtaagatagccttgccaccgtgttcaatgatgtacttaatagttggaagtgcagcaacgatacggttgtcgtcaccaataacgccatccttaattggaacgttaaagtctacacgtactaagacctttttgcctttaacatcaagatcgtcaacgattaatttagccattataatcctccgattattttgatattttttcttcaaaaaaaggcggaaggaagaatctccctccgccttctcaattaccacttaactatataatcagttaattaaaattaatgattaaagagttgcaaagtgtaataaagtacgtaccatttggcaagtgaatgagtattcgttgtcgtaccaagcaacagtcttaactaattgcttgtcacctgcagtggttaccatagtttgagttgggtcaaagattgaaccagcagtcatgttaagaacatcgctagaaacaatgtggtcaccgttgtaagcaaatgatgggctttcgtacttcttcatagcttcgttaacttcgtcagcagtaaccttcttgctcaagattgataccaattcagtttctgaaccatctggaactggaacacgttgtgcgtgaccgttcatcttaccgttcaagttaggcaataccaagccgatagccttagctgaaccagtagtatgaggaatgatgttttcagcagcagcacgagcgtcttgttccttaccactacgtgaaggaccatccaaagtcatttgagtaccagtgtatgcgtggatagtagtcatagtagcaacttcgataccgaattccttgtccaaagcgttagccattggtgcaagtgagttagtagtacatgaagcagctgaaacaatcttgtcatcagcagtcaaagtgtcttcgtttactgagtaaacgatagtcttcaagtcgttaccagctggagctgagatcaatacacgcttagcacctgcatcgatgtgagcttgtgacttagccttgctagtgtagaaaccagtacattcaagaacgaagtcaacaccatcgttcttaacccatggaatgttttgtgcttgtggttctgcgtatacgtggtaactcttaccgtcaactacgattgaatcttcagttgatgaaacttcgtggttgaaagtaccatgagtagtgtcgtacttaagcaagtaagcaagcattgctggagtagtcaagtcgttgatagcaacaacttcaatgtcctttgacttttcgccaaggtccataatacgacggaatgctaaacgaccgatacggccgaaaccgttaataccaattttaactgtcataacctaaagtcctccttaagaactataaacaacatttattttaaacgggatttcatttcccctttaaaatcatatttgaggcgccctcatcagtgattagccaggtttgatgaggcgcattaggcatataagctttaattgcttgagcctttcgggcaccacaagcaaaagcaaatatgtggggtattttgtataggttctcgaactgcaatccaacctgggtgatgcggtcaacaaccttgccatgttcatcgaagaaacacccgaaacattcggtgacggctctcttctcacgaagttcagatagcttaattgaattatagcctctgcgctgtgccatttcttgagctaacccaataccatgaatcacagcatcactttgagaaatgtcttgcagaacatctgcgatcgaggactcacgaatcaaagatttgtaagcatcatctgaaacctgctcaggtaaatataatgtcttataagtacctgaagtcttagcagccatttcttggacgattgtattactttgcgtctctacattttcgcccaaagctcctcgacctggaacaaattccaactggcgattgttagctaaatctggtgataaatacttagcagatctagctaacgccgctccacctagaattgtaactattgaatggcctaaaggcaagagtaaattcaaagctgaacttaatttttctcccatctcctcatatactcggtcttggaaatccgcattaccagggacgatcaatgttctttcaatccctaattttttggctaatgctacttccgtttcaccggcattaaagaggcgatcaagcaatggtcctgcatcttttaatgttttctcacccttttcagttaaaaacatcccaaaactttttgtttcaatcaatcctaattgacataagtactcagtctcagttctgatgtttctctctgaaagccctaaatgctgagcaacactccgacgtccaattggcgcatgtagcgaaatctgctcaaggacaagatacctttgtcgaagaatctttaagacgtcgggaacgagcgcttcgagcaaagaaaagtccgaatccatcgttccctcctttccatgggacatctatcgaccacctacgtgtcgttttgtgtcccagaatgcttaaaaatataagagaaacgtacttttcattcaattcatacatttcccaatcgacactgttagtataacaatgtatttttcgtaattcaagaaaaagatacacgattttaaaaaagtcgtaaatcgagtaaaatcatttttatttcattactttttttgatatactaccacttgtgaatcatctgggcccttagtgtaatggatcgcacataagattccggttcttagaatctgggttcgactcccagggggcccatataactacatgttgaagactaccgccatctcggtattcttctttttttataccaaaaaagcattcctcacggaatgcctttttcaatatcacaattatttagtgcttgtagtcatcaactcagcacgttgtgctaactcagtgtacaaagttgagcctgaaacagataaaccttcaatttcacggcgagtgttgaaatgatggctacccttataagtaccatttgctgctacacggaagatgtagtcgttaaaaccaatatagaattgattgtggttgctgtcataagcaaaaccttgaactggtgaaccagttacgaaattactttgagtagcaccgatttcttctggagcccaagtgtcaccatttctagttaacttccagtattcatattggtgacgaccaccattgtggaacaatgcatacatagtgttgtcgccaacaaaggttgcattatggaagtaacgaggatatgcactgctgccgttccaggtcttaacagtccagattttgttaatcttcatatcactctttcttacttgcataatttcttctgaagctgttgaattagcagtcttattgttattagccaaaacataaatgtagcttgaagaagagccaagtgattgaccatgacctagcttaatgtatggtgaaactttaatattgtttgcgtagcttctaaaagtgctccatcccatagtagttaagttttgagcagcatatttactcttaattgcattcaagttgtaagaaacaagatgtcctcttgagtcgctactgctagtgtacatagaagctgtaaaaataccatcattaacagtaataccttcaggaattaccccaacttgtcccattgcatcagcagcttgaccatagcctaagctgacaaaacgtggttggaacaaacgagtgcgcaaagtcatgccgttacctgaatagctatttgagctagtttctgaacgataaccgtgtgcctgattccaatttcttgatgatccctttgagccaccattccaagtatgaactgccttaggaccactcttaacagaagcacctgcactagtaattccttcatttgtatctgaacgaacagttacattaacgcttgcctttgccttaccatatgaataatctaccttagtagtgccggcacggcttgaactaacagagctatgtgaaacattaaccctatctggattaattgcagtaccttgtccatctgttgcatagttaattgcatccctagttggaaaactgtagttgctgttgtgaactaagctaacatcttgagctactgaaatttggtttctagcaaaaaagttttgacttacccaacctacattgcgtccatcgacaataatgtaccagaagttacctttcttggtagaaacatacttcttagattgaatttgaccatgcttaaagtacttggtatttgaaaatgcacctgatggtccttttttagatacattatgataaatagcgtaattaccattgccagcaatcttagtaactgccttgctgtagcttttggcatctaccttgctttgactaatggcaaaaacaccaccaactaatgcagcactggccacaaaagttaataacatctttttcccttttaacatccttattaatcctcccatatgaaaaaatcacgttcattttagcacaaatttatcaaatgaaacatctaattattaaaaaatttcctgaacaacaagactttgaaaacgcttctgttatataattaaaaagttcacataaatatataaatagtaatagggagaaattttatggtcgaatcacaaaataattccaaaaagatgatgtggaccaccctagcaatgatggccttctctaccgtgtggggctttggtaacgttgttaatgggtacgtctactttgacgggacaaaggttgtctttagctggatcgtcatgttccttctctactttgttccttatgccttaatggttggtgaacttggagctaccttcaagaatgctgaaggtggggtttcctcttgggtaaatgccactatgggcgcaaaatgggcctactacgcaggttggacctactgggcttgccacgttgtttatatttccagtaaaggtactggtggtttaagagcgatggcctggggtatcttcggaaatacaaaatggtatgatggcttacctaccgcttggacacaatttgctacattagtagtcttcttgcttttctgttgggttgcaagtcgtggtattccagtattgaaaggcctagcaacaattgctggttcttcaatgtttatcatgtcaatcttattcatcattatgatgtttgccgcaccagctattaatccttctgctggtttccacagtattgactttaactggaagaatttgatgccaaccttcaacgtaaaatactttacttctctttcaatcctagtatttgccgttggtggttgtgaaaagatctccccttatgttaataaggttaaggatccttccaaaaacttccctaaggctatgatggctttagcaatcatggttatggtatctgctattttaggtacttttgccatggcattaatgtttgaccctaaggtggttaatgccaaccttaacgaatacatctctaatggtgcctacatggcatttgacaagctgggcgaatattaccatgttggcggcttgttcatgtacatctattcatggtgtaacgtaatcggtcaattctcaacattagtaatcagtatcgatgcaccacttagaatgcttttgggtagtaaagaagctaaagaatttattccaaagggcttattaaaactcaacaagcatggtgcttacatcaacggtatctggatggttgttgtcctctctggtggcttaattgctattcaagctttagtaccaaatgctcaagctgttatggcacaattagttaaattaaattcaactactatgccacttcgttacctttgggtatttgcggcatatgttgctttaagaaaacagcagcaaaagttcaacactacttatcaaatgactaaacatcaaggcttagcctatactgccggtatttggtgttttgtagttactgctgcatgttgtatcttgggtatttactcaccagatccatttaccttattccttaatatcttgacgccaatcgtcttgattgcattaggtttaattttgccaggaattaagaaatatcaagaagcaaaggcaaaataaaatttaaatacagaattttaaaaaggaagcaatttcaaaagactgcttcctttttagtgtatatttttatttattagcccaagcatttaccaatgccttgtacttggcaacgctaattcctgcacctttactgcttcctaaatatgaatcagcatttccataaccagtattgcttacattggcaaatcccattactctataatttctgttaatcaaattcaagtagtgtcctgccattttatagccgttcgtgccctctacggccgcatcataagttgccgtccaagttggactatacttcgccggcttcaacgaatgattcttttttacatcataattccaacttttcttttcagagaaccaagtatcaaccggatctaaacccacactttgagtagcgatgttttccaaaccaatcgacttgaaataatgagtatgctttaagccaccacgtttttgatagtcagcatttaacattgaggctgctgtcaaaagtggtgacacctttaatgaccgaaccccttcacttctacgtgctctattgacactattcaaataaggcaatacagctttaatattcttagcactagttgcatcatcatttgaatgcaagtcaacgtattcattgtaccaacttgccttaggctttttacctaagcgacctgttttcaataatttcactgctgatctagcagagcttctttgccctttagtcaaagatttgtttttagatagatatgtcataaaatcaacggcatttttggctgccttaactggcttggaactcaataccgttaaagataaggtcatcatcacagctgatgcacctgcaattaaaaatcgttttttcattctttttctcccatattaatatatgtgaactacgatttaattgtagcacatacactaatggaagattttccttttaaattgcattatccatccatcttaacgtattgtcctttttcatctacaacacctttgaaatggtgcatgctgccatcttcggcctgaaattcacctaagtcaatttccccatagccctttgtagaatcagtaaccttaacatcatcaaaagtttctctgaaaaattgatgaacaattctactcttcaaccgtatatcctttgaatgctcaaaggctgcagacaacgtaaagccctcatctaattgttccttgataaaaacaattagatacaaggtcgctaaattatagcggcgcacaccactttgatcatctgaaatcggcttaatgtagcccttagtttcccaatagcgcaattgcctttgcgaaacaccggtcaatttactaacttcaccgattccaatttctaaattttgaaaaatgtcatgcataatttttttagatttcatcctgataccaccttacagtatagttatattttatatattgttgttatcttttgcaacacttgtgttaatttatctaacttatttgtaagattatttgacaatggaaaattttaagcctatagtttttatagttaacttttataagagaaaggaatattacatgaacaagcaaccaacggatattcatggaaaagcttataatcgaaacctactagttttagttttaattataggttctttctgtactgtattaaacggaacactgctttcaacagcgcttccttcaattatgcgttcatttaacatcagcaccgcaactgctgaatggctttcaacagcctttctgttagttaatggtgttatgatcccaatttctgcatggctaatcaatcgcttcggttcaagaaaaatgtatttgtcagccatgtcaatcttctttattggaacagtgatcgccgcaattgcacccaattttggcaccctgcttgctggaagaatcattcagggattaggcgtcggcgttactatgccacttttacaaacaatcatgctttccatcttcccagctaataaacgtggtgcagcaatgggaactgtcgggattgttattggcttagcaccggcaattggaccaacattatctggttggattgttgataacctttcttggcgttatcttttcagcatcattgccccaattgcgggaatagtaattatcttagctttctttttaattaaagatgttttaccaactaagaaagaaaaaattgatgtttggtcagtaacaacctctactctaggcttcggaagtctgttgtatggtttttcagaagctggtaacaaaggctggaccaatcccgagattttaggatttattggatttggaattatatttgtaatcctattcggtatccgccaattgaaaatggatgacccatttttggacattaccgtttttaaacactttgaattttcactggcagctgccttaagtggtatcaccaacttagcgatggtcggcattgaaatggttttaccattatatattcaaaatttgcgtggcgtttctgccttccattcaggtttaatgttactacctggtgcattgatgattggtattatgtcgccaattactggccgtttattcgacaaatatggtgcacgtaaaatggcaattactggtatgactttgttgaccattgggactattccattcgtctttttaactgaacaaagttcatacacgatgattatcattctttacgcaatcagaatggtcggtgtagctttggtaatgatgaatgttactacatctggtatgaattctttaccattaaacaagatttctcacggtactgctgttaacaacactttcagacaggtattaagttcaattggtactgcaattttggtatctgttttaactacaactaccaataataatatgcctggtaaaagtttacttcatgcactgccacttgaatacaagactagagcaatcagtgcaactttagacggttttcatgcttcatttgcaatgagtatcctcttctcattaatcgcattagttctttcattcttcttaaagaagggcaatcgagcacgtgaacatcaagaaaaggtggatggttaaatgatacttttaattctaatcgtagctgcaattatgtttatttactttaatatcatccctggaaaaaggcatacttctattgcatggctatcattaatcgtaacaattctttgtgttgttggcattgtagaacatgattataatcactggggaatgaaaactgaaacaacttcaagcactaatactctagtttccagtgctactcctcgcctgccaattttgctttatcagcctttaggtaatggaactgaaaaagtttacctttataaaactggtcagcttcaaaagaagccaaaatctattaaattacgcgtggtgctagttaaatcgttttagttaataaaaaagtccaatcttgttagactcgacttgtaaatagtaataatagaaaagagtctgatctgattgaactgccttaagcttaagcgttttagccaccatttacaagttagttttaaagatttagtgataatttgtcggcactggtatcgtttgtatgcaccggctgagtttactcatcggcgaaatattgatcaaattaaaactacggacagtctgattttggctttacttatctggcaagctaagacaggaattgaatcacaaagaagattctgtgaatgtttcaattgtttatcacactcacgttttaatcggcgttcacgtcagctattgcaattgatttatcagatacggcaagaaatgaataaaaaggttgacctgaatggacatttcttgatcattgacagctttccggtacctgtttgccaaccaattcgcaactatcgtgctaaaatttttcgcggttatgccaacattggttataaggccaccaagaaaatttacttctatggtttcaaagttcatgccattgttagcgatgacggttacattcttgattatgtcgtaacaaaggcatcagttcatgatgccagggagacagttgaactgatagaaaatacccatccatctaattactatcttcttggcgacgaaggctatttaggcaaagaactgcatcaacagctaaaacaaatgggttacgaactttggacaccatatcgtaaaaatatgacaggagctaaaaagcacaatgatcatcaattgatggctattcgcagaacaattgaaagcgacttttcgcttctgacctattacaatgccgagaacaatcgagcacgtagtctgataggctttcaaagccggttggaaattgcaattttagcttataatttggcttattgtctagaacgatttaactagcaccacgcgtattaaattagataaagtatcgacaaaagtaaaacgaagcagccaaccaaaagtaacgattaagactactcgctacacctatagcaatacctttaatcaaataatgtttggcgtctttggtcatgacaaggagttaaaacacagagaatatattttttctattccctccaactggaaagtaatgtcagttaacgatgccaagcagttgcaaaaacaaatgatgaaaaaacagcagtttttaaaacaaaaatcagcccaataaaataatgaagctcaaactttgatcatgatatgaaccccgaaattcggacatgaatttcggggtttttatttatggctaaattatctaaacatgacaaaattgatatttacaatagctagaaaaattaaattcattttaactcaaattttaccatatgatttaagttaacttaaatcacctttacaaacgcttatgaaatataatttaactaaatctaaatgtagaaaattatttttatcatactgcctatttcaattgcatcctatcattaaagtaatttttataagccaaatagccactaatcacggctccaaggccagtggcagaaagtaacataaatgtaatcataatctgatacttaattgcataaatgggatttacaccagcaaaaattaagccggacatcattcctggcaaatttactaatcctacagttttagccgaatctatcgtaggctgcatcgcagtcttaatgctccttcttaaaattggcatcgatgcagttttaatatcactacccaaagccaacttttctaaaacttgttgatgcagatcattaaagctatcattcaacgctttatagcataagccaactgccaccatttcatttccagcaatcatccccgtaatgggaatgacctgcatagggactggtttaattacgccagaaaaaatcagaattcctaatgtcacgtaagtccctaccgcttcggctattatcgaattccaaatattccgccccggattaggatcacgctgattagcattccaagatgcattaaaaattatcacaatagttgaaaccaaagttagccacaaggcattaacatgaaaaataaacttcaaaacgtagccgattacgactaactgaattatcgccctaatcacgctaattaaaatatccttggttagtcctaatttttctttcgcagaaattccaatggaaactaacaccagtgcaaaagctaatactaacgaccagttgctaactacaacatttttcattcgattattccgcctttttttactcttaaaatattacttgcttcatcaatttcactttgatcatgtgtaacttgaataattgtcacgcctttctcagaaacatccttaatcaaattatgtacaatatctttactttgattatcaagcccggtagttacttcatctaagagcaatatctttggtaaaaatattatgtttcgaattaacgcaactctttgcttttcaccacctgataaagcagtaatctttttatctaaaaaatcagcagagagatcaacttgattaagtaaatcagctatttgcttgtcatttacatctacttttctaatttcatacgggaaaatcaaattatctcttactgtttgcccaaataaagacggctgctgaaaacaatatgaaacttctctacgatattgaactggatttaaggagctaatgtttttttcttgatatagaatatcgcctgaattagcactaattaaatttgcaatcaatcgtaaaatcgtactttttcctgcacctgatgggccaattaaggttagaaaatcgcctttattaaccttaaatgatacatcttgcaatatttgttttttatctgcactatattggatatgttttaattctaatattttcattcttttgcctaactaaataactcatttttctaattatacaactaaaaaaataaaggaaatccaatattttcattgaatttcctttatttaaattaatatcgataatgattacttagtcaacttttgtttactttcaagtaattcagcacgttgagctaagttcatgtataacttgttgttgtaggttgcgataccttcaatttcacgaccagtgtggtattggtaagtatccttaacttcaccatcagttgcaatcttagcaattacgtcattgaatgcaaggtagaagttattgttcttggcatcataagtaaacccttgagtgtatgtgtttgctacaatgccacccttagttgcacctaccatagttggataccagttatcgcctttgcggttgaattcccagtattcagtttggtctttttctttattataaagagttgtgtaaagcttgtgatcatttacaacaacaccattattgaagtaacgaccgtctgaatcactaccgttccagcatttaatagtccaaatcttgttaatgcacatatcgctcttccgaatttggattaactcttcagacatattgctcttgtatgaaaccttattattgttatttagaacgtaaatgtatttatcagttgagcccattgcttgaccgtgaccaattggaatatatggactaactttaatgttcttaacgtaagaattgaacttcttttggctcatatcaagtaagtattgtccgttaaatgcattggttaaatggttaagattatatcctacaatatgaccattgctaatcagggtactacttaataaactagtgtacaaccagccatttgacatggtaattccttcaggaatatgacctacacggttaatatagtcatcatttttaatgtcacggtaaacacttaataaaactggttggaagaagcgagtagtgaaatctaattttccgctttcactatcataagcatgcttattcttatcaggagtaaaatcagtcttagttacatagttagcagaactgccgtagtaagtcttccaggatttcaaatcgccgttaaatggcttagcttggacgctatcagcatcagcaattccttccttagtactctttctgacagttaccttaacagttgcctttgctttaccatagctatatttaacattataggtacctggagttgagcaatcgattgcatcttctgaaatcttaatatctgctgtatcaattacagtacccatataattggttacataacttactgcatcagttggatcaaaatcgtagtgactattttgtactaaactgatagtctttggtacagcgatagcatctcttgtaaagtagttttggttaacataaccaactttacgaccatttacataaatacgccaataagttgcatcctttgtcttaattctctggtcagattgaatatgagcatattgataatcgctagcatcagcaatcttaccactaggtttaccattactaatctttttataaacaggataattcttattgctacctactttaaccattaagtcataagaagtacttgtttgagctggtcccttcttcgcactggaatcagtcttagcagtatctgtattactatcagtagttttagaattatctgcaaatactgcatttgtagaaccaattaacaaaccaacacccagtgctacagctgaagtagcagttaaaattttatttgaatacttcaaacctatcctccgtatcttatattttgcattttacttttatattataatatataaacactgttagctaaaatacatttttattaccattgttaccattgagcttctttatttgacactttcattacgaagtgatttaattagcactgtacttgaaagagtgctaattaatacgaaatcaattaggaggcaaatttatgctagtacctacagttattgaacaaactgctcgtggtgaacgtgcttatgacatttactcacgcttattaaaagacagaattatcatgcttagcggtgaaattaatgaccaaatggctaactcaatcatcgctcaattactcttccttgatgctcaagacaataccaaggatatttcactttatatcaactcaccaggtggtgtaatcacctccggcttagctatcatggataccatgaactttattaagtcagacgtatcaactattgcaattggtatggcagcttcaatggcttctatccttttgactagtggtaccaagggtaagcgtttcgcacttcctaactcaactgttttaattcaccaaccattaggtggtgctcaaggtcaacaaactgatatccaaattgcagctaacgaaattttgaagagccgtaagaagatcaacgaaattttgcacgaaactaccggtcaacctttggaaaagatccaaaaggatactgaacgtgacaactacttaactgctgaagaagccaaggaatatggtttgattgacgaaatcatggttaataagaagaagtaattaattattaaaaattattcacactctaaaaggagcttgcactcattgtgccaatgtcattaagttaagacattgacaattaatattagacttttaaagcactgatttaacatttaattggttaaattggtgcttttttcgtacaacaaataaggcatagcacagattctgcttttttaagctacgcgatataaataatatacagctgatttgggcttaatatttctcttgtccttgcggcctggtctaattggaatggtataatagctgatctgaataaggatccgttcaaaatcttgcgttaaagaagaagccaaatacatgctctgaataatcaagcatgattgcttgaaattgatggcatattgatacttgcaatgcttttgcggaatataggcctgtgcatcaatttgactgattgcattaaacataatcatatgggcataaatttccatttcaataaatttatcttgtttggaatggaactgtacactgcctaaagaatacttcaatttcttgaaggaggtctcaataccccaacgcagatgataaagctctttaattctttttagcggataattttttcgatcaagattggttagcacaacttcccattcttctttgcctgatttggcatcattaattctaaatttgcaggctcgaaattttattgtgcataactcgccaaaatcccagcttagatcctgggtatttttagagcgatacttaatatattggcgataatgatgctggacatggtgaatattctcactggctttatgcgtgatgtagtaatagttagaagtagttaccaggcaggaaatctcacgatcacattcttgatcaggcaatgtcgttatttctttaactccgccttgtccagccttagttcgtattatgtaatgacagttaggcaggcgattgcagttttcaatcatattgaaactagtgtagccacgatccattgttacaatatatggaccacaattcaaagctttaagcatttgaacagccgctttgcgttcatccatttctgatttaggctgaaaaatacaatcctggtaggtattattcaatagatcatataaggcattaacgtgaatttgacaatagggtttctttttatgagaagaagcttgtacaatgttattcgatttcggattccagatttgattaaagtcagagccatcaatggcaaacaaacggtagtgatgatcaaaaagttgaatattaaatagattttgattaaaaacagtcagaatatgtttaaaacaagcaggagaaagctggcttttgcgttgaacataggcagaagtactaactactttatcgttctttttagttgcatcttcgccaaaagctctaaagagttcactgtttaaattctgaccttgcatgttaattgtagttttaaggactgtcgctgcatctaaagtgcgtttcctggtaaaagcatgaggattattaataaaatcgtgaatatgatccccagtattattgataatttgatcaagacgttctagaatattcttatgaagggctttcataattaacaccatctttctggcaataattttgaaggtttaaaatatataatatataagataggcgaaaaggctggtcttttcgcctttattttatacaaaaaaagagatcgaatccaaatgattcgatctctaaaaaagcacccttaattgtcaatgtcttaacttaatgacattgtcattgtgcaggctcctttttcttattctcttaaactctcagctaactcatgtagtttcttaaatcggtgattaactcctgacttcgaaatcggaccatccggaatttgattagctacttcctttaaagttaattctggatgcgccaatctaaaacgcgctaaaacttgcaatttctctggtagatcatctaagccgttttcttgttcaatcagctggatgtcttctacctgcttagctgaagctgaggctgtttttttcatattcgcggtatcacaattaaccaagcgattaaccgaatttcgcatatctcgcataatacgcaaatcttcaaagttaagcattgcattaagtgcacccactatatgcaaaaagtcgccaatttttgcggcttcttttaaataaacaatatagcctcttctacgtttagttgctttagcatttaaataaaaataattattcatcaacttacataaatcctcattatggtcctcataagttgaataaatctccaagtgataacgactcgtttctggattattgacactacctccggctagaaatgcaccgcgtaaataggacattgctccttcacgtgaagtcataattctctgcggaattcgcgttaccaaacctttttcaggatcccagatttgtaagttttctaggatttcttgtaccttctgattcaatcgtaccaaatattgattattttttttcaatttcatcttgcgcgagacaatcagcaatggctcaataccataagcaatcttaatcagcttaaaaattcgtcgagcaatcgcaggattttctgtagttatatctaggctaaattgatgatcgtgcaagtttaatacaccattcattcgcaaaaaagcagctaactctgctttggcatgctctggatgcacctcaagcgaagttagctcctttttgacttcactagcataactagccatcattttccttcattcttttacgtgacattgattcaaatgccagattaataatttcttttcctaccttttcaccatcatgaaataccaatccatgacgttgatcgataaagtcatcagtaatgacacggcagttttgctttcttaagccttcaaagtcattcttaacaggctcaagataagcatcataatcttctgggtgaaatttgctcatatcaattttggcaccattaaccagagcggtattgatataatttccacctaagtgatcgttaattacctgtacgtgttccgcatcactaaagtgatctgtctcaccacgctgagtcatgatattgcaaatataaataacctcggcgtcagtctcacgcactgcttcacctaaattagagatcattaagttaggtaaaattgaagtaaataaactacctggcccaagtacgactgcatcagcttgcataatcgaagccagtactggtaaaacagctctaggctcttcatccgaatcagtatcggtcacccagacacgcttaatccgcttatctttagatgtgatttcagtttcaccagactccgtagttccatccacgaattctgcgtttaaagtcaatggttcattggatgctggaaaaacatgaccatcaattttcatcatttttgacaaagattgaactgcatcaaagatattgccatgcatttcattcaatgccgcaataattaaattaccgattgcatgtcctgaaaaaaaggaatcggatgaatcaaatcgatactgaaaaatattcttttcttcctgaggtaagtcactaagtgataccaaaacattacggatatcaccaggtggaactacgttaataaagttacggattgaaccagatgaaccgccgtcatctgaaaccgttacgattgcagtaatttccgcgttttgatcttttaaggcattcaaaataactggtaaacccgtaccgccaccaattacgactacacggggacgtctgcctttaatcacgcgaacaatccttgtttctccatatggcacaggtgcgcacctactttctaatataacgactcacttcacggtgagtaatatcgactggatattttttagctaaatctcgtgccaactgttgggcaattgaaacactccggtgttgacccccagtacaaccaattgcaatggtcaacttttccttcccctctttgatatatccagggatagctgtttcaagcaaatcaagcaattttttataaaagacctgtgtttcttctttgttcatcacatagtcaaatacacgcttgtccagtcccgtaaatggtcttaattctgaaatataaaatgggttaggcaaaaaacgcacatccattacaatatctgcatcaattggcatcccatacttaaagccaaatgacatcacttcaattgaaaatggctgccgcttgcgatcactaaatgtattgattaatttttgctttaattccttagtcgacaagtttgacgtatcgataatataatttgatctatttttaattggcattaaaatacgacgttcttcttgaatgccatcaagcaagcgacctttgccattattggctaaaggcggaagacgccttgtttctttataacgagcaaccaagacatcatcggaagcatccaaaaataggatagtagcttgcacattgccattatcttcaagtgaattaacttcatccaataaatcgcgataaaatgtcttaactcgtaaatcaattactacggctaccttatgaaagtcattggaattattaattaaatcccaaaaactacctaataaagttggaggaagattatcgactacaaagtagcccatatcttctaagtcatgagcgaccacagttttacctgctccgctcatgcctgtgactattaataattgttttttctcatcagccatactgaaatcctcctctttacaaattatatcataccgggtgtgtcataattgtgcaaaaaaaagaagcctttcggcttaaatttttatcaaatattaacggtgcataaatgcaaccacaatttcattaatgccaaagactaataaccagaatgcaactaaccatactaagcttaaggctgcgattactggattaataattaagaagaaggcaataatcaaacttaaaatattcaaaatcaagttaaatacaaagtatccggttgaaaatgcacgtaagtgccatgaccaagcaatacctacaactgaatcaacaaagaaccagattgcaaataagtaagcgatagtcaaaccaccaatatcatatgagcaaatgaacaagataccgataatgatatctaatacacctgacacaattgctacccaactacgtgagaaaaattcacgaaagcgtgagtaagcagccaaccatacaataccttgaacgattgatacaatagcaaaaatcaagacaaatgcatgcaaccctttagctgggtgacgtaataacacgaacgcaactacgaccattaagataccggcaataaatgcgccccagtcaaagccgtgattatctctagaactagaaaaaatatccatttttattcctccttgcagactattttacacttattcaaggttaataaaaactattggctattgtcttctagcctatttttttgcttcttttgttagtttagtatcacgttctaagactggtttcaaatactgaccagtatagctttctttaactttcgctacttcttctggcgtaccggtagccacaatttgaccgccacgttcccctccttcaggacctaagtcgatcagccaatctgcatttttaattacatcaagattatgctcaataattaaaaccgtattgccttcatctaccaaccgctgcaaaacttctaataaacgcttgatatcatcggtatgcaaaccggtagttggttcatcaagaatatagaaatttttaccagtagaaagcttttgcaattcagcagctaatttcattctttgagcttcaccaccagataaagttgtagcggattgacctaatttcacatagcccaaacctacatcaacgatagtctggagtttacgctgaatcttaggaatattttcgaaaaacttagttgcttcattaatcgtcatatcaagcacttgagcaatattctttccccgataagttacttccaatgtttcagaattataacgagtgccgtgacaaacctcacatggtacatatacatcaggcaaaaagttcatttcaatcttgataattccatcaccatgacaggcttcacaacgtccacctttgacgttgaacgaaaatcttgctttagtataaccacgcaattttgcttcattagtttgagcaaataaggttctgatatcatcaaaaacactagtataagttgcaggattactacgtggtgttctaccaatagggctttgatcgatatcgatgattttttcaatattcttgtaacccttgattgacttatacttacctggcttagttgaattattgtttaatttttgggctaaagcgcgtttcaagatcatattaaccaaagtagatttaccagaacctgagacaccactgaccacaataaatttgcccaacggaaaatcaacattaatattctttaaattattttcttgagctccagtaattgtaatctttttaccattgcctttacgacgcttcaatggaaccggcacaaattttttaccagacaaatattgccccgttaaagaatcaggattctgctctacttctttaggagttccttgtgccataactttaccaccgtaaacaccggcaccaggtcccatatcaaccaaatagtcagcttgccgcattgtttcgtcatcgtgctctaccacaattaaagaattgcctaaatcacgcattctctttaaagaagcaatcagccgatcattatcacgttgatgcaaaccgatagatggttcatccaaaacatacataactcccgataagtttgagccaatttgagttgccaaccgaatacgctgagcttcaccaccagacaaggtattagctgatcgagaaagagttaaataatctaatcctacactatccaagaatgaaagacgatcgcgtacttcctttaaaatcggcttagcaatcatagtctcttgctcgcttaatttgacgtccttaaagaaatcaagtgctttatcaatagaaagctccgaagcttccgcgatatccttgcccatgactttcactgctaatgctttttcattcaaacgcttgccgtgacaagttgaacaagtaagttcagtcatatatttgcccatcacatcacgcataaacttggacattggtcgtttataacgccgctcaacattggccattactccttcaaatggttgaacggtatcattaacgccaaagtcaccagttacatggaatttcaccggcttagttgagccatgcagaataatgtcgcgttgacgtttagttagtttattaaaaggcttatccatcggaatttttaatgccgtgcaagcttgttccaacatttcagtatagtaattggaagtcttccatggagccagtgcaccttcagctaaagattttgttttgtccggaacaaccaaatcttcgtctactgctaacttcatccctaacccatcacaatcaaggcaggcaccaaatggtgcattaaaggagaacagtcttggttccatttcacccacagtaaagccacactttggacaagcataatactcagaaaagttaagcatttcaccaccaattacatcaacattcatgtagccatctgacaaacgaagtgcagcttcaatagaatcaaataagcgagacttaatgctatccttaacaatcaaacggtcaacgacaatatcgattgagtgacgcttgttcttagctaattcaaaatcctcaccaatttcgtgcatctcaccatcaacaattacacgaacatatcctgcacgttgcactcgcttaaatacttccttgtgttctccacgcttagcacgaataactggcgctaaaatttgaattttcgttctttctggtaaagccatcactcggtcaaccatctgatcaactgattgtcgttgaatcagcgtcccatcattaggacaaattggatggcctactctggcccaaagcaaacgtaaataatcattaatctcagtgacggtcccaactgttgaccgtggattatgtgacgttgttttttgatcaattgaaattgctggatttaaaccatcaattgaatccacatctggtttatccatttgccccaaaaactgtctagcataactagaaagtgattgcacataacgtctacgcccttctgcataaagcgtatcaaaggctaaagaacttttacctgaaccagataagccagtaataactactaacttatccttaggaatagttaaattaatgtcttttaaattatgttcacgtgctccgcgaataacgatcttatcatttgccattaaaattctttccttttcttgatgatttttgcaattccataattgcatcccgcaagttagcagcttcttcaaagtcaagcttcttagctgcttcttgcatttgctcttgcaagttgctaatcattgtcttcttttgcttagccgtcaattcatcaaaattaagatctgcaaaactatcagatttttcttctttttcactcgacggtttagtaatcgaaattacgtcttgaatcggcttaatgattgtcttaggcgttatgccatgctctttgttaaattccatctgaattttacgccgacgcttggtagctttaatcgctgctctcatggaatcagtaatcgtatcagcatacatgattacttcaccattggcattacgggcggtccgtcccatagtctgaaccagcggccgatatgctctcaagaagccttccttatctgcatccagaattgctaccagtgaaacttccggtacatcgattccttcccgcaacaggttaattccaattaagacatcgaacttacctaaccgtaagtcacgcaaaatttgcattctttccagcgtcttaatatcagagtgcaaataacgtactttaattcctaagtccttcaaataatcggttaagtcttccgccatttttttggtcaaagtagtaacaaagactcgttcatgacggtcaatccgtttattaatttcgccaactaaatcatcaatttgaccctcaattggccttacttcaatcttgggatcaagcaatccggttggtcgaataatttgttcaaccttatgatctgttcgttcaagttcataatcacctggggtagctgagacatacaaaatttgattaacatgcttttcaaattcggatagctttaatggacggttatcaagtgcagatggcaaacggaaaccatagtcaatcaaggtttgcttacgattacggtcaccattgtacattgctctaatttcaggcatagtagcatgtgattcgtcaattaaaattaagaaatcatctgggaagaagtccaacaaagtatacggtggctctcctgcttttcgtccttccatatgccttgaatagttttcgattccgttggtatagccaacttcacccatcatttccatatcataggtagtacgttgcttgattctttcagcttcaagcaatttgccttcgccttcgaactttttaacctgcaatttcatctctttagaaattgctcccaaagctcgccgcaattgctcgtcattggtcataaagtgcgtagctgggaaaagcgaaatactctcacgctcaccgatcacctcaccggttaacgaatcaacttcaacaatgcgatcaatttcatcaccaaagaattcaattcgataagcatgattagaattgccggctggaaagacctcaactacatccccgcggacccgaaaacgaccgcgttgaaagtcaatatcattacgatcatattgaatatttaccaaatcacgcaacaaggtattacggtcatattcttcgccttcatggatcatcaagacactgcgcgcatactctttaggatcacccaaaccatagatacaagaaaccgaagcaacaactactacgtcattacgctccattaaagctgaggtagtagcatgccgcaactgatcaatttcatcattgattgccgaatccttttcaatataagtgtctgattgtggaacgtaagcttctggctgataataatcatagtatgaaacaaaatattcaactgcattattaggaaagaaacttttaaactcaccatatagctgccctaccaaggtcttattatgcgtaataactaatgtaggcttattcagcttagcaataatattggccatggtgaaagttttcccagtaccagttgcaccttccagaatctgttctttatatccttttttaaatccagcagtcagtttatcaatagcttgctcttgatcaccggctggtttaaactttgatactaattcaaatttgcgatttttttgtcgtttaatcataaaaaactcctcaagaaaaaagttggacaagcatagtccaactttttaattagtatctatattttactaccgcgaacgtgctttcgcacgaaaaatgcttaattatttaagtaaatctgctaaagccttttgataatcttcagctgccttttctgcagtggcaatgtcttttttgtttacaccaacataggccttaattactggttcagtacctgatgggcgaagtgctacccaggtttcatcatctaagaagtacttcaacacattagattctgggaacccttctaatggtgtctttttgccattttcaatagtttctttttgcaagaaatcttgaatcttaagcactttactaccgccgatttcagttaagtgctcattacgcaacttgctcattaattcggccatcttcttttgaccaccaatacctggcatttcaattgcacgggtaatttcataagcaacgccatacttttgccaaatttcttgcaaaccatcaaagacagtcatcccacgtgaagcatagtatgaagcaacttcggcaaacatcaatgcaccctgcatggcatccttatcacgagcaaatggtttaaacaaatagccatagctttcttcaaagcccatcaagaacttagcatcaccagctttattcatccggtcaacttcttcaccaatgtacttaaagcccgtcaaaacatgcttagtcttaataccaaagtcctctgcaatcttaaatggcaaagcactagaaacaactgaagtaacgatctcataatcaggggttaattgaccattttccttcatatgagccaataggtagtaagccatcaaagtagcaatttggttaccagtcaaaacttggaaatcaccatcagtttttctaactgctgcacccattctatcagcatccgggtcagtagcaataatgacattagcatttacctcatttgccaacttaaaaccaggttcaaaaacatcacggtattctggattaggcttaattgtggttggaaattctggatcaatgattgattgacttggcacaggaatcacattatcaaagccgccttgtctgaaagcacgatcataaagcatcttgcctgtaccatgaagtggagtataaatgatctttaacttgtcagcgttggccttaaccatctctggatcaacagttacttgcttcaattcattcaagtaatcttcatcaacatcttcacctattaactgcaaggtgccattagcacgcaattcttttactggtgcagccttgacagcaaaaatatcagttactttttgagcataagcaaaaagtcgatctgcattatctggtgccatttgtgcaccatcttcaccgtaaactttatagccattgtattgcttagcattgtgtgaagcagtgatattaattccagcgaaagtatgcaaatgacgtactgcatatgaaagttctggtgtcggtcttaaatcatcaaataagtaaacatgaattccgtgtgcacctaaaactctggcagcatgttctgcaaactctcttgagtgatatcttgaatcaaaggaaatagctaccccacgctttttagcatcagcaccattttcttcaattaaacgagctaagccttcagttactcgacctacagtaaacaagttaatccggttggtaccgggttcaagacgaccacgcatccccgcagtaccaaaattaatatcctgtccaaaggcatcttcgatccatttttcatccttgcccaaagtatttaattgatcttttaaataatctggtaaattagtagctttttgccattctgtataaatttctttagcgtccatcaatgtcctctattcattaaaagttggatttctaaagcgctttcaaactgttaacaattttctattatctgctattaattataaaacttattagtcattaatttaagctttagacaaaaaaagacatgtccaatacgaacatgtcttaatgaaaaaacgaataaatttaatttttcttgtcttgtaagtcttggtagtaattatatgcagcttgaccagctacactaccttcaccaactgcattagcaatttggcgtaaatctttttgacgaacatcacctaaagcaaagataccaggcaccttagtttccatatgatcatcagttacaatccaaccatggtcatccaagataccaagatccttaaaaggttcagtttgtggtaaaacacccacgtaaataaagacaccagcaactggaatttctttttcggcaccagtttccttatcgcggtacttaacccctgtgactttcatgtcatcgcctaagatttcttcagtttgtgcattccaaatgaaatgcatcttcttgtttgcaaatgcacgcttttgcaaagttggttgtgctcgcaattgatcacggcggtgaataactgtaacgctcttagctaattgtgaaagataaattccttcttcaattgctgaatcaccaccaccgatgacagctacatcttcatctttaaagaaagcggcatcgcagacggcacaatatgaaacacctttgcctgaatattcttcttctccaggcacattcaaatgcttatgatctgaacctgtagcaataattacgatcggtgcacgatactcattgccatcatcagttttaactaacttatcctcgccatcgagttcaacactttgtacgttgccatacttataatctggttcaaacttcatcattgtgtcgtacatcttttgactaagttctggacctttgatttcagaaaaaccaggataattgtcgatagcatcagtattgttcatttgaccgccatagggaccgcgatcaagaacaagaatctttaagttagcacgcgcagcatataagccagcagtcatcccaccaggacctgcaccaataataattacgtcgtatttatcagccataatctatccttctttctacttacttttgataagcaaataatacaatagatttaacttcttgccaactattttgcttatcttttataaacgaatttcaggcttgggttctctacccatcattttcttaatttctgtatcaacatcagcatcttcataaagaacacggtagattgcctctgaaattggcatatcaatgcccttttcttcacataattcgtgaacagctttaacagtagtagcgccttcgacaacttgtcccatatttttcaaaacgtaatctaaagtcttgccttcgccgatttgtttaccagcacgccaattacgtgagtttactgaagtacaagttacaattaagtcaccaatacctgacaagcctgagaaggtcattggcttagcaccaaagtattgcacacccaaacgagtgatttctgctaaacctctagtcatcaaggcagctttggcgtcatcaccatatccttggcctactaaaatacctgcagcaatcgcaattacgttcttaacggcaccaccaacttctacacctactaaatcatcgttagtgtagaaacgaacgtagtcattggagaacaattcttgtacccgcttagcattttcttcattagttgatgcacatgcaatcgcggttaaatctttttgagcaacattttctgcgtgactaggacctgaaattgcaacaatcttatcttcatcatctggataaatttcttcagttaaaatttcagaaataagcttcttactgcctggttcaatccctttagttgcagtaactaacagtggcttagcacccgtcttatctaaaaccttgcgtacgtttttagcaacgattctaactgccttagttggcaaaacaaataaaacaagttctgccccatcaagagctgcttccaaatcaccagtagccttggtattctcatttaatttccaatccttcatatagtggctattggtgtggtgagcgttaatttcttcattaacactatcaatgttaccgtaaagagttacatcgttaccattatcggctaacattgaacccaatactgaaccccatgaaccattacctaaaactgcaatctttgtcattttttctctcaaactttctaattaaaatcttttattaattctaatctcttgaatacgggtattttaatccactaccatccaaataccattttggattaacgactttccgccgataaatccataaaataattgtagcaataaagaggattaaacttaatgcctgtgatactcgtattataccaaaaatatacagactatctgtcctcattccttcaacgaagaaccttactacactataccaaagaagataggtcatgaaaacttctccctgcttgaagagatgttttttatgacgcaaggatagaattaagattaagccaatcaaattaaaaaatgattcgtacaaaaaagttggttgataatacgtcccgcctattttcatttgctcaataataaattgtggtaagtgtaagctttgtaaaaaatgaagagtagttggtgcgccgtgcgcctcttgattaacaaaattaccccagcgtccccaaatctgagctgccatgactccaggagcaatgatatccagcattaaaaatggaggtagcattcgtttataacagaaaatcaacagcacaattaagccggcaattaaaccaccataaatcgcaatcccaccattccaaatcgcaataatttgctcgggatgctgtgaataataaccccattcaaaaatcacataataaatacgtgcgccaacataccctaacggtactgcccacaatagcaaatcgacaaaatcatctggaataatttgacgtttttttccttcgttaatcgccatccagcaagctaacataatggctactgccataatgatgccataccatttgacacttaaattccctaaatgaaaggccaccggattaattactaaattagtcattatgcggcaccttattcgtatcttcttttgagtgctctgaaatcagactagtcaaattattatcaaaagtttgagttgcatcatagcccatcttcttagctctgaagttcatcgctgcaacttcaataataatttcaatattgcgtccaaccttaactggaatattaacctgtggaattggtacattgcagatttcacgcgtattttcttgaaaacctaggcgatcataattagcttttggatcccaattaaccaaattaattaccagttggatttctgttctattttttacggcaccggcaccaaataaattcatcacatcaataatgccaattcctctgatctccattaagtgctttaagatctttggtgcttcacccacaacggtattatggtctttttgaaaagcatctactcgatcatccgcaattaatctgtgtcctctttgaactaatcccaaagcagtttcagacttaccaacaccagatgcaccagttaacagcacacccatccctttgatttcaaccaaaacaccatgaatgctggttcttttggctaaacgagcacgcaagtattcagttaaaatactggatatgtaggtagttgactctcttgtacgcaaaattgggattttgtgttcctctgctgccgtagttaattcttccggtacaggcaaagagcgagaaatcaaaaaacacggtgtagccttagtacacattttgttaaagacatgcattctaatatcatggtccaagcgtgccgcatatgaaatttctgtccgacccaataattgaattcgttgcgcaggataaaaatcaaaataaccagttaattctaatccagggcgataaatatcagaaacataaatttcttcatctttgatatattcctgtccttggtaaacttcaaggatactctgattgtcctggatcaatttgcttaatctaacttcatcagccatattaggcctcctaactatttatcaatatctttagtggtgacatttctagctttttttcttggtctaggaccagaagtactagtagccttaaaccactcacgataacttccactacttggcatattatcttgatttttccttccagtaaaccgataaataagccaaatgattaaaatcgcaattacagctactggtaaaagtaaaataaatgccttaaatagaacaaacaataaacttaaaataattagcgctactaaaacaagcgttacaatttccattaaactcattttttaacctaatctggattctcttgactaagcaaccactgtaaataggaataaataaacggttgcaattttccgtccattactccttgagcgtcagctgtttcatgacctgtccgcaaatctttcactaggttgtaaggatggaaaacatatgacctaatttgtgatccccagccaatctccttttgatcgcctttcagagcctgcttttgcttacgctttttttcttcttctaagtgaaaaagctttgctcttaattcattcatcgcagtttcacggttttgcaattgtgaacgctgtgcctgagacgtagtcacaattcctgttggtaagtgcgtaattctaacggcactagaagttttattaatatgctgcccaccagcaccactagagcggtaaacatcaacccgtaaatccttaggatcaatatcaatttgaatactgtcatcaacttctggaatcacttctacagaagcaaatgatgtatgccgtcttttagccgcatcaaatggcgaaattctaaccaaacgatggacaccattttctgatttaagcattccgtaagcatttttacctacaattcgcgcactaacgctcttcaacccagcttcttcaccaggctcataatcgttgatttcaaatttaaaaccagctgtatcacaataacgttgatacattcttagaagcatctgtccccagtccatcgcttctgtaccgccagcaccagggtgaatttccatcaaagcattatggctatcatacttacccgacaagagcaggtctaactcataattatgaaaatcttcttgcagcgtagctagatccgcttcaacttctttttgcaagtcaggatctggttcttcacgcaaaagttcaaccgcagtagtttcgtcttcgtagctagtttgcaattttaaaaatgaatcacgtttttcctttaatcggttggtttcactaattaatttttgcgctttttcctggttattccaaaaatcaggctgcgccatcttgttttcattaatttcgatgctttcatcaatcgcatctaagtcaaagagaccccctaaagtgatttagacgtttttttagttcatctaacacactttgaatttcactaatttccatttttacctaccatcttttattttattgcaaaaaaagggaagctcttaactcccctttttctttattaacgactaagattttgtctaatttcagccttcatgaacaaacgagttacatcaaattcaatatttgaaatcatttcttcaaacattctgtaaccagaatcttgatattcaactaatgggttcaattgaccgtatccacgaagaccaattgattgacgcaactgatccattgcatcaatatgatcagtccaacgatcatcaaccacacgcaagataactaccttttcaaattcaagcatttggctaggatcgcctaaggccttttccttatcttcgaagttttgctcaacaatgtcataaagcttcttcttcaaatcttcaacactaatagtcttgaagtcaattgagtcagttaccttgtctgaagtcaaacttgaggaaatgaaatcgcgtaatgagtcaagacgccattccttgcgttcaccttgagtaaacattgctacttggtgatcaattgttctgtgaatcattggaattaaaacattcttcaatgacttatcagcttcaatgacctgcattctttcgccgtagataatttcacgttgaatacgcataacatcatcgtattgcaaagtttgcttacgagtatcatagttattaccttcaacacgtttttgagcagattcaacttggcgagtaatcaagcgactttcgataaccttatcatcatcattatctgataaacgatccaagaagtccttaactcgatcaccaccaaaacgcttcatcaaatcatcttcaagcgacaagtagaatctggtgtaacctgggtcaccctgacgaccagaacgaccacgaagctggttatcaatacgacgtgattcgtgacgttcagtaccaataactgccagtccaccaagttctttaacaccaggcccaagcttaatatcagtaccacgaccggccatgttagtagcgatagttacggcaccacgttgaccagcgttcatgatgatttgagcttccttagcgtggttcttagcgttcaaaactgcgtgaggaatacctgctttatcaagcatcttactcaaacgttctgaactttcaatggcaacagtaccaaccaaaacaggttgaccattagcgtgacgcttcttaatttcttcaactacagcgtggaacttagagtccaaagttggatacaaaatgtctggcatgtcttttctggcaattggacggttagtaggaatcgtgattacctgcatgttgtaaatttcacggaattcttcctcttcagtcttagcagtaccagtcatacctgacaacttcttgtacattctgaagaagttctggtaggtaatagtagcttgcgttcttgattcttcttgaatcttaacgccttccttagcttcaatagcttggtgcaagccatctgagtaacgacggccttccattacacgaccagtgaatgagtcaacgatcaaaacttcgccatcttgaacaacgtagtcgatatccttaagcatgatgtagttggcacgaagagcttggtcaatgtggtgaaccaacttttggttttcaacatcgtacaagttctttaggccaaagtgttgacaagccttttcaataccagttctggtaagtgaaatagtcttagttggccagtcaatcttgtaatcgccgtgatcttcatcatcgtcggcatcatcatcgctcttgtcttcagtcaaagtcttaacaaagcggtcagcacggatgtaatcactgtttgcttgttcagcttcaccagaaataatcaaaggagttctagcttcatcgattaagatagagtcaacttcgtcgatgatagcgtagttcaatggacgttgtaccatttgttccttgtaaacaaccatgttgtcacgcaaatagtcaaagccaagttctgagttagttgagtaagtaacatcacagttgtaagctgcacgcttttcgtctggtgacattgagttcaagttcaaaccaacagttaagccaagccacttgtaaagttgacccatttcttcttcgtcacgacttgaaaggtattcgttaacagtaacaacgtgtacacccttgccttcaagtgcgttcaagtatactggcatggttgctgtcaaagtcttaccttcaccagtcatcatttcggcgatgttaccgtagtgaagtgcaataccacccaaaatttgtacgtggaatgggtaaagtcctaatacacgcttagcaccttcacgagcaactgcgaatgcttctggtaaaagatcatccaaactttcgcccttctttaaacggtcacgaaattctggtgtctttgcttgcaattgttcatcagatagcttgctcatttcatctgcatgagcttctaccttagctgcgattttttcaaatttcttaagttctcttttatcgtcgttatatagtttctttaaaatatttaccattaaatcggtccttatatgtcgtaaagtctaaaaatacagaataattttaacatgtttatcagcaaaataaaaatattctaaacaaaaaaccccacgctcaaacaaacgcgaggttttgaattaacgagtattttaactcaattattcgttagtttcaattaagccgtaacgaccatcgtttctacggtaaacaacgctagtgccgttagtttctgcatcttcaaaaacgaagaagtcatgttccaacatgtccatttgtaaaatagcttcttctggatccattggctttaagcttacacgcttgttacgaacaatatcaaattcgctaggcttcttttcttcttcttcaggttgttctacaaagaaatcttgtaatcccttttcacgactctttctatttacacgagtcttgtactttctaatttgacgttcgagtttttcagaaacgaagtcaatgctacgatacatatcatccgtggtttcttcggctctcaaaactaagtatggtaaaggaatagtaacttcaactttagctgagtgatcacggtatactctcaagtttacgtgtgcaatcacatcttgattcaattcgaagtacttctctaacttgtttaaccgcttttctacataacttctcaaagcatcagttacttcaatattttctccacgaacattgtactttaacatataagattctcctttcaccgctatgcggtttttctttacaaatttattataccaaaaaatgtaagcgtttcataacaaatctaatgacaaattgaaaagctttcaattttcatttcgggaaaaccctgctgtaaacggtcccgcgcgtgatatagcgtgcgcccggtcgtgtaaatatcatccaaaattaatacttttcctgaaactatattttccttgattttaatatttttatcaatcaaaaagctttgaggcgttttaagccgctcctctttgtttttctcaccttgggcatgactacccgattgtttaatcagaagcggtgtcagcggcaaaatatcagcataaatagcaaaaattgtatcaaactgtcgtcttgattgatgttcaggtgaagtgggcacgggcacataaaagtcatagttagttttacacaaatagtcataacacaaatcttgcaatacttcccgcaaaacataatctccacgccgcttatacgcaaccatcaagtcatgaaaagcagaattataacgatataaagcatgattatgcagaatattttcgccataaatggcttgccaatttcgacaatcgctacacataaagccttgacctagttccttatcacagccagagcagcgattgtctgctaacttttcaaattgttttaaacattgcaagcaaattttactttttcgcgctgttttaaaagaaaaaagttgtgcaaattgtaccggtggagtaaactcctgctcacataataaacaagttctcatctattcatccccttgatctgcttaatactctgtcgaatattcttggtataacgatgataacaatacaaaactaagcccgtttggtcatcgtgagcccgaccaactcgacctgcaatttgcaccaaactagcagcggtataaattgcatcatctgctgcaataataattacccaaacatttttaaaagttacaccacgctctaaaattgtggttgtcaacaataagtcatatttacgatcacgaaaagcctgtactttttctaatcgttgcggatcttgtgcatgaacaccggccaatttaattttattttgcaactttttccgcaaagcttcttgataaagcggaatttcttcaatccgtggtacaaacaaaagcaaaggatgaccactttgaatgacttttttaatctcctgcattaatttaggatgaatttgtcccttccgcaaaaacggcctgataaaaagcctttctcttggtacaggcaataatccaccatgaaaacgccgatttaagcgcaaaatttctaacttccctgttttagcttccaaaagcaaatcgttcgttggcgttgcggttaaatacattcgagtcccagttgttttaaccgcatttttggccgcaaaatgtagttgcggattacctacataaggaaaagagtctacctcatcaattaccaataaatcaaaggcacgataaaacttcattaattggtgtgtagtacaaattgtcaactgctctagccctatttccttaaattcacggccatgatacttaccgatctcaacttgggcaaacgctgccgaaaatcttggaaacagctcatttaccacatcaattcttggtgtagcaatacaagcgcgctgtccttttttcatacatcgagcaatcaactgaaacaacatctcagttttacccgccccagttacagcatgaaccaatgtattttttctttgttcaaaattttgtactaatttatccgaaatattctgctgcaatggggttagtttaccttgccagcttaatcccccgtttttaacatgagaaaaagtattattactgtcttttctaataagccaatcgccctcatttgcacgtcccaagccaatacaaccacgacaataatatttaccattaggcagtcgactattaacttggctgccacagcgattgcatttacctttttcaattactggaattttgcggcatccctcaaatgtgctagaatcctcttgactaacaatccattgacgacctgataatagagtcaaatcttccatatttttacctccctattatctattacgcaaaaagaggcgattattttgtcagaaaaggaaaattttttaactattaaagaaaacggcaccggtgaattaattatcaaaaagagcagattcattgccaatattgcccgcaccactactactgatgcggcaaatgattttattcaaaaaatctctaaaaaatatcgcgatgcttcgcacaatacctttgcctacacgatcggcttaaatgacgaccaggtcaaagaaagcgataatggtgagccatcaggtacggctggtgttcctgaattaaaagcattgcaattaatgaatttaaaaaacgttacagtcgtagtaacccgttattttggtggaatcaaattaggagcaggcggtttaattcgtgcctattccaatagtgtcaccaatgttgttgaaaaagtcggcgtcattaaacgcgttttacaacaagaattaatttttagcgtaccctataaccgcttcgatgaagttgatcattacctaaaacagcaaaaaatttttattgccaataccgaatacggtgtggatgttaaaattcatatttttgttaacgatgaccaacaagctaaacctaaggaagacctaactaatttattggccggacaggttacctttactaatggtgaaaaacgctataatgaaattcctgttgaagctaataattatcatgaacaataaaaagagcatttggatatttccaatgtcattaagttaagacattgacaattaagggtgcttttttagagatcgaatcatttggattcgatctctttttttgtataaaataaaggcgaaaagaccagccttttcgcctatcttatatattatatattttaaaccttcaaaattattgccagaaagatggtgttaattatgaaagcccttcataagaatattctagaacgtcttgatcaaattatcaataatactggggatcatattcacgattttattaataatcctcatgcttttaccaggaaacgcactttagatgcagcgacagtccttaaaactacaattaacatgcaaggtcagaatttaaacagtgaactctttagagcttttggcgaagatgcaactaaaaagaacgataaagtagttagtacttctgcctatgttcaacgcaaaagccagctttctcctgcttgttttaaacatattctgactgtttttaatcaaaatctatttaatattcaactttttgatcatcactaccgtttgtttgccattgatggctctgactttaatcaaatctggaatccgaaatcgaataacattgtacaagcttcttctcataaaaagaaaccctattgtcaaattcacgttaatgccttatatgatctattgaataatacctaccaggattgtatttttcagcctaaatcagaaatggatgaacgcaaagcggctgttcaaatgcttaaagctttgaattgtggtccatatattgtaacaatggatcgtggctacactagtttcaatatgattgaaaactgcaatcgcctgcctaactgtcattacataatacgaactaaggctggacaaggcggagttaaagaaataacgacattgcctgatcaagaatgtgatcgtgagatttcctgcctggtaactacttctaactattactacatcacgcataaagccagtgagaatattcaccatgtccagcatcattatcgccaatatattaagtatcgctctaaaaatacccaggatctaagctgggattttggcgagttatgcacaataaaatttcgagcctgcaaatttagaattaatgatgccaaatcaggcaaagaagaatgggaagttgtgctaaccaatcttgatcgaaaaaattatccgctaaaaagaattaaagagctttatcatctgcgttggggtattgagacctccttcaagaaattgaagtattctttaggcagtgtacagttccattccaaacaagataaatttattgaaatggaaatttatgcccatatgattatgtttaatgcaatcagtcaaattgatgcacaggcctatattccgcaaaagcattgcaagtatcaatatgccatcaatttcaagcaatcatgcttgattattcagagcatgtatttggcttcttctttaacgcaagattttgaacggatccttattcagatcagctattataccattccaattagaccaggccgcaaggacaagagaaatattaagcccaaatcagctgtatattatttatatcgcgtagcttaaaaaagcagaatctgtgctatgccttatttgttgtacgaaaaaagcaccaatttaaccaattaaatgttaaatcagtgctttaaaagtctaatattaattgtcaatgtcttaacttaatgacattgggatatttccaaatgcttttttgctacttattattttttttactcttcaattgatctggtttttcgtctcctaagtgccaaacttcaattgttggatcagttttactcttttgattaataattttctgaattacatgcatcaaaggatggtatttttcacccaataaaccaattgattccacaaaatactctaaggcaatcagcaagcctaagatcagaagccaagtgccccaagttggcgaaagcaggaataataaagaaataaatgagaaaaccaatgataatgcgtaaatagtcaataccgtctgtcggtgcgttaaccccattcgcatcagctggtgatgtaaatgatgcttgtctgcttctgaaattggctttttgtttagctttctccgaatcattgcataaacggtgtcagtaataggcactcccaaaatgataattgggaccaacaatgaaataaaagttacattctttaaccccttcagagataaaacggcgatcataaaaccaatataaagtgcacccgtatcacccaagaaaatttttgctggatggaaattatatggtaaaaagcccaataaacaggcagctaacataaaacaagcaattgggacatatagctgatgagtgtgcaagaagaaataacctacgatccccatggtagtcagagagatcattgaaaccccatcagctagcccatcaagtccatcaatcaagttaactgcattagttaaagctaagatccaaaaaatagtaattgggaaactccaccaacctagatttacttcatgtgcgatgaatggcacctttaacacattcattctgattccagctaaaaagtagataatcaatgaagcgataaaaatcccaaacattttttgtctaggttttaactccaaaatatcgtcgatcaatcccgtcaaaacaattacgcttgaagcgagtaaaatcgaaaaaatttcatgagtcggaaattgctcacgcaacagaacaaaagtaccgatattaaaagtaacaaaaatccccagtccaccaatcgttggcattggtttcttattaactcgccgggcattaggattatcaacagctcctaagacaaaggcaagccgtcgaataaacggtgtaattgccgctgaaataattactaataagaataattcaacaataattttaaacatatttggctactttccttatttacttgttctaattatacaagtagtcagtattttgcacaaatagcaaaaaagtttggaaaaattatcttccaaactttttaatttatttagcgatcgccacaactcttttttcacggataacggtaatcttaatattacctggataatcaagttctttttcaacctgattacgaatatcacgtgccaaaataactgtccgatcatctgaaatttcgtcaggttcaaccatcacacgaacttcacgtcccgcttgaattgcataagcctgcttaacgccttggtagctcttagcaatcttttccaattcggtcaaacgtctaatataattttccaaactctcgcttcttgcaccaggacgagcactagaaatcgtatctgctgcaacaacaagttcagcaataaacgacaacttaggcacatcgccgtggtgtgcagcaatcgcatttactacaacatctggttcatgatatttacgagttagttcaaccccaatttctacatgggaaccttcaatatcatgatcgatggctttaccaatatcgtgtaataaccccgcgcgaactgctaatttttcatccaagcctaattctgcagccatcgtgcctgctagcttaccaacttcaattgaatgtgacaaaacattttgtccataagaagtacgatatttaagacgacctagcgtcttaactaattcaggattcatccggtgaattcccagctccatcaaagcactttcacctgcttcatagatgtcatcgttaacttcttttctggccttatcgaccatttcttcaattctagctgggtgaatgcggccatccttgattaagcgttccatcgctcttttggcaatttcacgtctaattggatcaaaaccactcaaggtaacaacctttggcgtatcatcaataattagatctattccagtcaaagcttcaaatgaacggatattgcgtccttcacgaccaataatccgtcccttcatctcttcatttggtagatcaacaacagatacagttgtttcggcaactgtatctgccgcgctactttgaatagcatccacaatgacctgattagcataatgatcagctttagcttttacttcttcgttactatttctgatcatctcggctcgttctttgactagttcatcagataattgactaagcacaatcttcttggcttcttcctcatccaacttagctacgtcataaagcttttgccgtctagtttctactaattcttcagcctcagttaattttgcctttaagctagcatactgctgctttaattggtcttccttttgcgtgagtccactttcacgttcatctaataaagaattcttatgatctaaggtatcttcacgttgttgtaaacgatttttctcccgagctaaattatctttcttggaatttaactcatcctcggtcttttgcctaaaatcacgaatttgttcttgagcttcaagaattttttcttttttagtattttctgcactttgcttaacagccgctgctgcttgcttttgtgcattaacttcagcttgtgctgcagcaacctgtgccttagcatcagctaaaatgtggtcagcatcattctgggcattttgagctttttgttcccaagaatgcttgcgaattgcataaccaaccactgaacccaccaagaatgaaacaatggcagttgcgacgggaatcataattgttaacatattattcatgattactatcgccttttttagaattattcacacaacttttatgataaagaacctatctgttcatgtcaattaaatcaaaaaaccttggaaaataaatccagggtttttgacataattatttagcttgttcagactttttatctgtagcagcttctttttctgtcttggcttcttcgcgcttctccttgatcttttctggatcttcacgatcagcaattgacttttcatcaatcccgtaagcttgacgcacttgcttttggatatcttgataaatatctggatgctcttctagatacttcttagcattctcacgtccctgaccaattcgatcactcttgtaagagtaccaagaacctgctttatcgataatgtccttatcagcagccatgtccagtaattcaccactttgtgaaattcccttaccgtacataatgtctacttctgccaccttaaatggtggagcaaccttgttcttaacaactttaattttaactctgttaccaagaacatctcctgattgcttaatctgttcagctcttcttacttccaatctaatagttgagtaaaacttaagagcacgaccacctggggtagtttcaggattaccaaacattaccccaactttttcacgaatctggttaataaagatggcaatagttttggttttagaaatattacctgataacttacgcaaagcttgactcattaatctcgcttgtaaaccaacatgggcatctcccatctcgccttcaatttctgctcgtggtactaaggcagcaacagagtcgactactacaatgtcaattgccccactggaaatcaaagtatcagcgatttgcaaaccttcttcaccagtattaggttgtgacaaaattagtgaatcaatatctacacctaaagcttcagcgtaagcaggatccattgcattttcggcatcaatatatgctgcagtaccaccacgcttttgcacctcagctacagcatgaagggctaccgtagtcttaccagatgattctgggccataaacttcaataatacgaccacgaggatatccacctacaccgatagcagcatctaaagctaatgaacctgttggcactgttgaaatttgcgtatcagctttttcgcccatccgcattacagcacccttaccgaaattcttttcgatttttttaagcgctgcatctaaagcagcctgtttttcgtctttggccattaatgtcctcctatttttcgtacctaataattatactttgaccgccgtccaatttgcaagagaaatgcaaacgaacgttcaaaggattttttaccctctattatttattacgctaaaaatcgccattatttttttacaaaataaaaaaagaagcaaatgcttctttttaatcattcttgacttaatactattttacattgagcccttgaatacgccccatgattggtggaagtaatcgtaacctgagtaaatagtaaagatcaacgcaaggtaaagtaagatagtaccaatgtggaagaagtcaccaatcaataagaaaatgattgataacatttggcaagtagtcttaattttaccaggcatctttgctgctaaaacttgtccttcattttctgctaagatcaaacgcaaaccagtaacagccaattcacgacaaacgatgatagctactacccatgctggagcaagtttcaattcaactaagaaaatgaaagcagtcatagttaacatcttatcagctaatggatcagcaaacttaccaaaattggttaccatattacgtgaacgcgcaatgtgaccgtcaaaccaatcagtagccgaagcaacagcaaaaacgatagcagcaataacacgactccaaacaacagttgagcctgctgcttgaacactagcattcccaccaaaaatgatgattaacataaatactggaatcaaaaagattctaaaaacagtaagtttattaggtaaattcattctaacactcctagattttaattgttgttattatttccaccatcattgccattgttagtgtctgctgatgattgagtagtagatgattgttgagtttgactactttgttgggtttgttggctactttgagtagtagtagatgattgttgacgactgctttgacgagtagcactgctttgagtagttgtacggctttgggtagaactactattggttgtattgttattagtagagcccgtattattagaactactattattttgactagtagttcccttagccttaccaatcaacaaagtaattgtcctgtacgcattgtttgctgtatatgggattttcttacctgcaatagtgattgaagtaccattatcgttgcctaaagtaatcactactctctctgcattgcttggcaaagtcatagtgtgcttttgattagcaagtaaagttgattgccagctattagcattaccattgacttgtacacccgctgaaatattttggttttcaccagcacgcacaactaggcgacggtttttattcaagccagtaactcggtactcattgtcactaaccttagtaaccttaactttattgactactacttttttagctttcttagaagatgacgatgatgacttttgtgatgaaacagttacatcattattatcagcttggttcttttgaccacctgaagaaagacgagcatacaaaacgtacactacaagaattacgataattacaccaagtccgatcgcaattcgtggcaagtaattcttccacaaatttttcttattgtcggtggtttctcgtacttcttcactcttattatcaatcgagttttctacgtactcatctggcttagcttctggtacatcatcgtggtaatcacttaataactccttaccatccaagccaacaacttgtgcatattgacgaataaatgctctaacataaaaatcgcctggaagtttatcaaattcattcttctcaatcgcttcaagatatctgctctgaattttagtagctttttcaatatctgcaattgaaagtcccttagcctctctggcgctctttaatttatctccgatatctgccatatttacctcttcaaattttaatttatcatgttgagtataccataaaattctcattacaacgtcttagttataaaagccatccacctgtaacataaattgtctgtcctgttaaataactactacgtcgatctagcagtgttctaacccagtatgaaatatcactgccattggcccaacgaccaactgggatttcatcttttacctcttgaatcgtatcctcagaaaagaatgcattcattttggttttaaccgcaccaggcgcaattacattaaccgttaagttattggaagcaacttcacgcgcataagcctgagcgaacctggttataccacctttagttgcactatagacgctttctaatgcactacctgcaccaccatagactgagcctaaataaactatacgactaaaatctcgtttcatcagttgtggctctaacaatttagttaacttaattggcacagtaagattaatattaatcagatcagtgatatttgctaatttttcatcacctaaaaaaccatacttagtaattccttgagcaaaaactactgcattaactggcaacaagtttttaacaaaatctgttaactgtgcatcccctgtcgcaaaatccaactgtagcgacataaaatcctggtcaggatgcttagcaaacagctcttgaactaaattttcagctttttgagaattagaatgataatgcaagtataatgaccaaccggcatctgccaaatctcgacaaatatcttgaccaataccgccagttgcaccaaagacaattgctcgcttcaactttatcaaccccttacttgttttctaagtaagcagaacaaagttcactgtctttcataatcttttggcagtagtcataaaactgatcaaaattcatcgcctgcaatttagctatattttgtgttaaattttcatgatctaaattttcttcaattaattcaattgccaaataagacagatcattacttgtcctagcagtgcgtgctaaccattctttcttttgcaaaatgaagttttgtctaataaaacggtattccgctgaatttttcttaattggttccgtcaataccctctttatttctgcaattacttcttgagcttgaggacttacaccaaaaatagtagcaaaatcgccctgcctggtgtaattaacagaaatctgcagcgaatccattaacaactgcttttttctcatttcttcaaaccatggtcccattgcacttagttttgattctaacattatttctaacagaatttgagtcaaatcaaagcttaataatactttcttaaagtttttaaagcgaattcctaaaccaaaggaattagaattacctctggctggcaagacttgatcatgtaacatgcgaaaactaacttgtttttcagctgtgcttttacctttcccgtgcaaatatttttgctgcagctttcctacttgccgcaaaatcgtttgcacttgattatcagaaaaatcaccgcaagcaacaaattgcatcttttctggcacatacttagcctcataaacttgggtcaagtttttcactgtaacttgattaattgattctttcgtacctacaacttcgatccctagattagaatcaccaaacatatcatgcataatcgcattatttacgctccaagttgggtcatcctgatacatggccaattcttgttcaataatcggagcctcttgcgcgatattttccttagtaaaatacggctgccctaccaattcaaacaagagatcgatcattttaggcgtatgctcaattccactacaataaaacattgtttcattaaaagacgtgaatgcattaacgtcagcaccaatatcttcaaattgcgttgacaaatcaccatcttttttggcaaatagcttatgctctaagaaatgagccgaaccggcaaccttttgtggatcactactaccaaagtcaacaattataccgaaaaatcgttgataaaaatgtggctttaaaataatttcggctttaaagcctgactgatattcttttttgataatttttggtgtcatcattttaaaacataactttcattaaagaataaattttgtgcgaaagctactaactgcttaggtgtagctctcctaattgcattttcacgatcaaagtctaaatatcccgagaacaattcatcacgcaacatttgacccatctgccagttttgaccgtctagaccaatcttcatattacgcaaaattgcctttttagcctttttaaataaatcatcttctacttcgccctgaactagtttacccatttcggataaaataatttttcgagccgctgcaatcttactaggatcaagtcctgcactgactaaaaacaaagaattattggcaaagcagcttgcttcaacattataagctgctcccaattgctcccgaatttgcgtaaataatttagatgattgatcacctgccaaatattgcgataataatattcccattacttgaccgcgataatcaatactttgttctaaaccaaagcccattaacaattgagcttgcacatttccttgatcatcctctttttcaatcaactttcttttagctggaatagttagactagctgtttgaaatgatttagttaaaccagtttgttgaaacatagcctgagctaatttagaaaccagattattatccctggtcattcctaaaatttgcattggtacattagctaaattacgccaataatgcatcatagtcgtgctagtcgcagctttgatttcatctagtgagccaataaatgtctccgcataatcaggttgatcctgataccacaatttaaaaaactgctccaacgcataattagatggttgttcaatcagttcttgatattcttctgctaattgacgtttagcatattccaccaaaggttccgcaaaattaggttgattaactatttgtgcaatcacattaagaatttcttcatacgtataatgtggatccaaaatctcaatcggctcaacaaaattggcataataagtcaaaagtatttctttaccaaaaacttgtggcataatctccagctgtaaatcatataattctgccaatcttttttgttgtaaagcaagtgacggataacttaagctgctattcatctgtattcgcgctagcaaactagcataagctaaattatgtttagtcagcggcaaacgcaaaaaacagccaatagcggctgttgtaaactttttattttttctaattgcaatattagttgtgagcattgtttgaattaccttcattctttattggtggcactaaaacttgtcgtggcttagagccttcagatggaccaacaatccctttagcttccatttcatcaacaattctagcagcacgattataaccaattctaaacctacgctgcaacattgacacgctggccgtctgttgacgtcgtactaaatcaacagcttgctcatagaattcatctgctggctcatcatctttactatcagcatttgatgaattttcaccttttttaggaatcattgtctcatcataactaacctcttgttgcttcttaacccattcaattacgcgttcaacttcatcactagcaatataagcaccttgaacacgttcaggtttagatgccccaattggcatataaagcatatcaccacgaccaagtaatttttctgcacctgtttgatccaaaatagtccttgaatccactccacttgatacagcaaaggaaattctcgatggtacatttgctttaatcaaaccagtaataacatcaacacttggacgctgagttgccaaaatcatatgaattccggcagcacgtgccatttgtcctaaacgaacaatcgcgccttcaacatcgtgaccaccaaccatcatcaaatcactaagttcgtcaactacaactagaatataaggtaacggcttcatcactggtttagttttatcacgattgttttcagcaactttttgattatattcactcatgtttcgcacgccaccagccgcaaatagcttatatctgcgctccatttctttaacaactttgcgcagtgcatttgcggctagcttagcatcggtcaccacagggatcaataaatgcggcacaccattataaactgaaagttcgaccatcttggggtcaattaaaactaatttaacttcttcaggccgcgccttcattaaaatactggctaaaattgtattaatcgctacggacttaccagaaccagttgaaccagcaatcaataggtgtggcatcttagctaagttggcagaaataatgcttccagttacatctttacccaatggtacatccatcggatcgcttttggctttattatcttgatgttccatcacgtctttgaatgaaacaacagacgttgctcggttaggtacctcaattccgataaagggcttaccaggaattggtgcttcaattcgaatatctttagccgcaagcgccaaagccaaatcatccgctaagtttacaattcgacttaccttaacgccaacagctggctggacttcataacgcgtaatagttggtcctaaaatagcttttttaataatcaccttaacgccaaaactcttaaacgttgattgcaaaacttgggtatttttcttaattaaatcacggtcagtactctgatcagtcgatttaattggatcaagtaagcttaaaggtggcatcttataagctttattgactggcgcatcagtttttagttcaccatgatcgacatcggctaattcctgctttaacttttgatcatcttccgcaaaagaatgtgacttaggtagttcctttaccccgtcatcatgttgtggtgcaatttgaatttgcggttctggatcaggtgtggtctctggctcaacttctacgtcttcagccgtcggcgttacatcgtcatcagttggatcggcagggtcaaagtctgctacattaggaaaaatcggtttatcgtcatcaactaaatcttcgtcttgttcctcttttttctgacgccgcttttcccaaacgtcattatatttatctttgacctttaccccagcttctttattctttttgatgaataattgactaactgtctggaatttttcgataattgttctaaatttaacatcaaaaaacatcaaaattccaattggcagcaataaaatagcaaaaacacggacaccgatttgccctagtagtggataaaaaagttgataagctaatgaaccaattaatccaccaccaatgctctcagtgactccagcacgaccaaactccgcggccattgcatgccaaaaagaattcaggaaattactgttaactaattcatgttcaaaatacaagttacattgaattaacagaattcccaaaaaagcgattgctaaccccaagctacgcttaattgttaagtgaatcggttgattatagattaaatttactaggccaaaaagtcccagtaaacctgccgcaaacaaataagaatccccgaagaacattcgaatcaaatttgcgatttgcttacccaaaataccgaaacggacaaaagccagccccgctattaaaatcaagactaaaccacaaatactccaattaagattttgctttttgtttgcttttcgcttattgtagctctttttggcctttctttgtttcttttttgcaggcatgtactcacctgattaattatcgaattcagccttgaagttcaagttaaccggctgacccaaagttaattgggttgtttcatagatcaaggtctcaagttgctcaactaatggtcgagttagtaactgccaatctgaattactaatgtcagagccatcaccatggtaatcttttaattgcacgatttgatgaatcaagccgcttgcttcaaacatagctggtgcaggaattacatcatattgaatagcaacatcatagtaactaccattttcttctgaatgctcatcgtcaccgctaacatctaattttctaattcctggtctaacgtcactaattggtttggtatcttcatcaactaaatcataatgaaatgcctgtacgataatatctgtctgtttttcaaaatccattatttattctcccctagattacgttcatatctttcaggacgatcatagtcatcttttaacttgtcattttcataatgatgggttgtttccatattaggaaaaccttgctggcgtaaagcttctagcaaaaccattgctacagaattagacaagttataacaccgaatgttatcagacattgggatacgtaaattacggtcatagtattcacgcataaaagtttctggcaaaccagttgtttctttaccaaaaacaaagtaataattcttgttaggatcagtataatcgacttgtgcataattttttgatgagaatttagaaattaaatacatctcatcattaggccctaaagtcttcaaaaaggcattcaagtcatcatgtctgcgtacatcgaccttatcccaataatcaagacctgctcgcttcatttttttattatcgatttgaaaaccaagtggttcaatcaaatcaaggacagtgttagtccccgcacaagtacgagcaatattgccagtattagctggcatcaatggttcatacaaaactacatgattagtcattcaaaaaactccttatcaaaaaaagcgtagcttttaagccacgctttaaaactatctagtatttattcgctttcgtcatgatctgcatcccccgtggtcgaagaaacagcattctcttcaaagagtttagactctcttcgataataattgtacacgcgagacacaataatcttcaagatcgcataaattggaataccgaaaactacaccccataagccccagacggcactagcaccaatcaagagtaaaattgttgtaattgggtgcatttccattttattccccattacccatgggctaagaattcttgattcaattgtttgttcaatagcaaaaacaattaagaccttaattaacattgaacctgaagtcataattgaaattacaattacaggaatcattgctaatggtgtaccaaagtatgggattaagttcataaacccagctaaaattgccaaagccacgccatatggtaaaccaattagaatgtaacccaatgagaacatcacacctacccaaaaggcaacagtaatttgaccacggacatatgaagcaacagcatagttaatatcatataataatttgctaaaactaggttgccatttttcaggtgcaaacttggtaatatatggccgcagttgatgaccatcttttaacatgaagaataaaataaacggtgcagttaacaaagtcatagccaccattgtaataatgctgacggcagatgaaatattgccgatagttgcattgatggtactttgtccagacttaaataaggtcttctgcgtattatcaatcatgcctttgatactgcctttaaatgaatgtaaacgcggatcttgcaacgcattttgtgttgcattaaccgcatcattccaaatatgaggccagttctttatcaatgaattaatctgattctgtgcaattggaaccaagatattaataatccaaattaatgcgacaactactagtaagaataaaactataattgtcaccactcgcggaatcttaaattttctttcacaccaatcaacaaccggattcatgatatagtactgaattaccgctaataataatggcggtaaaattgcactaaagaagatccaggcaggattcaatacaaaagatactttattaaagacccaaataattaaaaagaatagcaggacgtttaataaaacaatactaaaacgattatctaagaaccattttttaaaaacagttccacccctatgttggttattttccatctattcatcctaatttttaaatgtgttcataaacaatatcatcatcaaccttaaaattaggtaatggttgatcaatatccggatcaaagtagatcgcattagcaagtggcgtcttagaaacgggacggttaaagaacaaggttgcgtgtcccaatgccttcatgttgctctctaccatcggaccaacatagtttgcaacataggtttgaccatcaacagtgattgtatcgccttttttaaaaacaaaaccactaactggcgtctcagtactgaatttttgaatgacagaaacgtcttccaaatccttattagcaccctcgccaaataaaattaccatgccatctttattatcgacggcctttttaccaatttttttaatatttgcaatccatttcataatataatctctccttaaaaataattttagcataagaaaagctgcttaaaaacttaagcagcccaaaatcggcgattattttttgctcaacaggaaatcgtgtttttaagcgtctaatccgctttcatgctatactttattttagacttatttttatttagagatggaggcccacacatatgaaggttttaatcggaggttacaccaaaaaaacttccaaagggatttatgaattacctattaccagtgcagcaaatgatgcccgtttaggcaaagctgagaatattattagcgttggtggtccaacttatttccgaaaagatggtaatttaatttttactgttaataacgctggcgataaaggtggaatcagcgtctttcaattaagtgatcaaggcgcaaacgaagttgaccactatttaactccaggctcttcgccagcttatgtaggaattaaccgcaccaaaaagttgatttacactgctaactatcatactgctgtcttgtccgttttccgctacaacgacagtggcaagctcgatctagttgatactgtaactcacaaagctgaaacgttgggtccgcgtcctgaacaagttgacggtcctcaccctcacttctttgatgaaaccccagctggtaacttggttagttgtgatctaggcaatgataccgttgatttttatagattagaaaatgatcaattaaaacacattgctcaatataagtgcgaaactggctttggtacacgtcatatcgtcttcagtaaagatggcaattacttctacgttgtcggtgaactttctagtcaaatcaatgtcgttaaatttaacgaagacacttgggactttgaaaatattgctacttataagacaattcccgctgattttactgaccataacggagctgctgccttatatattagtcaagatggcaaatatgtttacacttccaacaggggacataattcaattgctgtcttcaaagttaacgacgatcatactttgagcctggttcaacgtgtatccacttttggtgacttccctcgtgattttaattgggataaagatcagcgctacgtcgttgtcgctaatcaaaatacagataatgctactctttacacaagaaacgctggtactggtagcctaactcctattcaaaaagaaatttccgtaccagaaggcactcgcgttcttttcaccaaatagtaattagcattagtaccaaagtcatggcgcaatagaacgtcatggcttttttattcctacaacttaaagtaaaatagaaataaatgaaacaaaatataagtcatgtggtaataagtcaaatgaaaggcgatgatatttgttctttttgatcataaatttgagtatatgaaactaagccttggtaaaggttgattttttaaatgttaaacttttgtttacttttaaatttagaccaatttttgaaattaagacctcggtgtcctgtacagtttgtcatctttgagcaatttaaagataactcgtactaattttcttgcagttaatgtgcaagcacgtttatgcggcgagtagacagcttcatcatacttcttttggtaatattttttgaaaacaggatcatgtaatcttgctagattggcagcttcaatcaagtaatatcttagatatctgtttccagtcctggccattggagtatgttcgttgctgtgatctcccgattgatattgattccaggttaggccggcatacttagccagctgttcttctttatcaaagcgatcgatacttccgatctcagcgataataccagctgtataggttttgccaataccgggaattgattccagaattttgctttctggtaatgcatcaacgatacgatcaattgctttttctagatctttaatagattcattaaagctttggatcatgttgtaatgaacagaaagcactgcatcaattgaatcagtcattactttgcctaagcgatatgaacctctaacagctttcttaattgctttagccaaggtatctggatcggaaaagcgtcctctgcctttaacctgtaagtaagaaattaagtcttcggtaggcatatccgcgatctcatccagagttttactatcggttacaatagacatcattgtagcaccgaaaagaggagtattaatcttatctttatcgacagtgattagtttattaacccgataatataaagcttcaatgaagtgctgtttggtacgagtcagttcttgaactaattcatatctggtacgcgttaaacgctctaaagcaagatagttgtcttgtctggcaatgcttactcgataatgtccaaagcttagatacaaagcaatgtaataagcatcgagaggatcagttttactttcttcaaagactttatgaaacctgctggtttctttggggttaattacatcagtctctacattgagcttttgtaaatcttcgtcattttggaaaaagtaagcaggatgaaaactgtaaatagatgtagcttccatgccaataatgatttgatcatagtgtttattttgagctagatctaaaatttgttttttcagttcactagcaccataaagatcattgacaaagctatcgttaattaagcgtttgttttgatcttctgaatcaagtgcaacgacctgtaaatctttagaactaacatcaataccgacaaataatttcattggaaatggcctcctttctttcaaatttctgatcatagattttgatcttcacatgttaacccctaattacagttcttaagttcaatctcgccagtataagtattcactggttgcttctttgaaagctgcacctaatcccaattgctcaaggactagcaaaaagaagcaatcaatacagcatgtgagttagagcataaaggaactgcctgggtggcagacttataaagcagacaaaactgcaggaggtgataacctagaccagttgaccaaagccaatgacaattagaggctaacatgcgaagatcaaaaagcaaatactaatttgattaattatcacaatatgactaattacaatttatataatacgagaaggtgacaaagtgaaaagaaaaataattcgaatattacttttcattcttggcgggatattagggttactacttctgtataaactctatttaaattaccgtcctgaattgaatttattacttcattttgatcaccataatgaagaagtactcgttaacatggtccgtagccatggtattgaagacttagcctttttatttttacttaatgcgatctgtgtagcaattcctggcttatccaacggaatcttttgtgttctcaacggaatcctttatggccctgcctggggatttattgttaattggatcagtgacattttaggccaaataattttaatggaacttttgcaaaaactctatgacatgaaaaagatgtctaacagtaaagtttataagttattgactggattaaaatcaccaatgcttggattaattattggatatatgattccatttattccgagtgcgacagttagctatgtcaacattatgattaataaggagcaacgtaaaaaacagctaataccaatcattatcggtgtcatccccttcgcttacttatatgcttatggtggcgattcaatcttgcacttagacggaacacgattgattaaagttgtaatctcattcgttgtcattgctttaattgcagtagctattttgcttagtctgagagcaatcaaaaagcgtacaaaaaaagcttgaatttactcaagcttttttattatgcctagcatatttaaactaagttagcttcttctaacagttcttcgacccaagttctcttgattttcttcatccctgttttgagagctaacttctcaggtaatggcatctcttgatcaactaatttcttcttgtcagacatgtagtacatcgcacgaagcaattgacgaatatcataaattgagtcaaatacttcaggtacaccacggtcaacgttaagcaatgtataaacagcttccatggcagttctgacagaatattcggtggtaaagacagtgtctctagttggtgattcggcaaaattgccaataaaggcaatattaactgatccttctggaacaacatctggacggtccccatcatgacgaggcataaagtaactagtgatatatggcatgtaaactggtacggtattcatattttcttcactagccaattcgctgatttgactctctggcacgcctaagtgatagagcatttcctcggcaatttctttaccagtacagtcaacgactctcttcttgatgtaattaccctcagtatcagaatacaaagcataaatccaaacaacgatttgatctggattctggctcttaaagtgaggttgacggtgaatagtaaagctaagttcccaattagagtcaacaacagtgataattccaccagtattaactttaccatcgtaaaggctgcgcttagtcaagcgttcaaagtatggagctattttcttattttccaaggtagctgtagctgatacgaaccaactacgctctggcaagttttcacagaagacatctggatgaccaaagtcaggatcttgtttagccaaattttcccataatttccatgaagagcccttgtcgtgagtaattggtgctggggtattttgatcaccataagtagaactttcagtgattgaaccgttagtcacaaagacaatatcatctggggttaaatcaatatcactttgctcaccattcttggtcatcacgatcttcttggcaaccttttgcttgccctcatgatcaacaaccacgttatcaacgtgacaatcatattcaaattgaacaccgtgatcttttaaatatgccaaaagtggcttaaccatggactcatattggttatacttgttaaacttcaatgcggtaaagtcaggcaaaccatcaatatggtgaataaagcgcattgcataacgccgcatttcggctgctgagtgccatttttcaaaggcaaacattgttgcccagtatgtccagaaattagtcttaaagaagtcatcactgaagaattcttcaattgtttcacctttgagttccttttccggtgtcatgattaacttcacgatttcattagtgcacttacctagaccatattgaccatcacttggtaagcgatcaccgcgattataaattagacggcaattggatgagttaggatcttctttatcaagccaataatattcatctaagtatgatgcgccagggatttccaaacttggaatcgatctgtacatatcccacaaacattcaaagtggttctccatttcgcggccgccccgaaccacgaaacctgcattaggacgcttagcaccatcaagtgaaccaccagctacgggtagctcttctaaaatatgaatattttcacccttcatttgtgcatcacgaactaaaaagacagctgcagaaagaccggctaaaccactaccaataatataagcagattttttatctacgcctgcgggctttttggcatccgcaaaagcctcataattaccattggaatagtacataaagatatcctcttttctgtataagtatagtttttaacattacactttaattataaagaaagcggttactagatgcgagttttttagaagttttagctaataactttagaattctttattaattagtttctgccacagttcttgcatatcttttggatcattcaactcaattgttttacatttttgctggctaaatggatccggaaaatttaaataaaagcaatttaaggcttggcgtgaaaacccatcttgaattccatataaaggatcaccatataaggggtgtcccagataagccatgtgaacacggatctgatgggttctaccggtaagcaagcgtaactctaccaagctagcacctgtaacctgatctaggactcgatacgcggtttgagcgtcctttccatctgccactactgcacgtttaactccactaccctttttgccaatcggttgatcaattaaaccagttaactcattcggagcaaaattgccatgtacaattgcatgatattttttgacaaatttctccttgccaattttactaaaacgagcatgggaaattgcatttttccccaccaatactaaaccagatgtatctcgatctaatctagtaataacatgcggcttcaaatttttctgtcctttttgggcaaaataacccaacaatcgattgaccaccgcatcatcatcttcatagcgtgagggaattgacaacacacctgcaggtttgttaactacaagataatttttattctccaacacaattgatactggattattcgatggctttaaaaaatcatttttcttttcttcaccactgataaaaatcacttcatccccagcacgcaaattaaagctagtatatcttcttttatgatttactaaaatcatgccatgatggtgtttagcattgtttaacgcttgatgcgaaaaaccattttttaacaaaaaaggacccagctttttggggtctctttcttgcacaattagtttaaataaactagtcatttttttcattatctccaataaacgcattttgtacgcgtgaccaaaaatgatggtggccaaattgatcaaactgaatcgaatgccgcgaaattcgatattcaatcttcttagcattacgtacatcaattcttgctccatcaactgtcatcacaaaatgatctgcattaggaacaatcgaaatccattgatcaggcgcaatcacaattggtgatgacaaagttctaaaaactcgattattaattgaggcaatttcagtcatttgcaacgcttttagccggggatgaattactgcaccacctagtgatttgccataagcagtcgaacctgttggtgttgaaacgcaaagaccatcgcctcgaaagttttcaaataattgatcattaatgtacacatcggcctctaatgtatgtgaaactcttttaaccgctgattcattgacggctaaatggtaatgagtttcacctgattcagtgagcatctttatttctagtaaaggatacttcgctggttcacccttggttactgctaaagcatcaaccattttttcaatatcatagttacgccaatcagtataaaaacctaagtggccagtatgaatcccaataaagcgcacagaatctacttgattttcatagcggtggaaggcattgatgagggtgccatcaccgccaacagtgatcactacatcaggatatctagcatcaaagataaaacctttttcctgaagcagcttcttaagctgcgcaactgtctttaatgtttcatcatagttattatgcgctattgttactttcataatttttctttgcccttatttttggtaaaaattttctgagcttcttggacctcatccttaattgacgacatttcttcgtctagtctataagcggcttcagccgttgattttaatctagctgaaatgtcatcaggatagacaccttgatatttgtaatttaaagtatgttcgacagtagcccaaaagttcattgccatagttctaatctgaacttccgcaattaattttttcggaccttctggtaagtaaaccgtatagttaatcaccatgtggtatgaccgatatccactcggcttagcattttgaatataatcacgctcctcaacaacttccatatcatctcgagcatgaatcaaatctactaccttataaatatcgtctacaaattgagtaacaatcctaatccctgcaatatcttgcatatcagtctcaatgacatcaggactaattactcgccgtttcattttttccttgatagaatcaactgtctttacccggccaattacaaattcaataggtgaatgttctcccttagttaaaaagccttgtctaagggaacgaaatttaacctttaactcgcgaacagcttcgttataaggccacaagaagttatcccaatctaattccatgagaaaacattcctttcttaagcaaacaaactcattttaccatataattaagttaaacagttcggaggaaaaacagatgagtaaaaatcgagaaattgaagcaaaaactcttttaaataaaagcgtttatgatcagatcactgccgcttttccaatcaaaagtgactttacccaagaaaattattattttgatacagcagatgatttattaaaaaatcatcaaattagcttgcgtattcgaatctatgctactcacgcagagcaaacaatgaaggtaccggatcctaatcctgtacaaaagaatttccatgaagtaattgaaattaatgatgaattaactcacgctcaagctaaaaaattagtagcaaaaaagcattttaaattcactggtaatattggcgcatatctagataatcattttgccaatgaccaaaaaaagctacatcttttcacctggagcaaaacccgcagaattttgatgaacgggccacaaaactgtgaattaactctagatgctacgtcttatccagataactatcaagattttgaattagaaatcgaaaatactaatcctgctttaattcaaacagtattaactaaacttgaacaagaatatgactttgaacaaacggctgctaacactaatcaaagcaaaatagctcgtgcaagcgctcaccaaaaatagtatatagaaaataaggcatattttttgtcacttattttttttcttgctaaagtaactaatagtaaatcaccaaagaggtcgagattatgtttgagatttttctattcatcaatccaatagggatttattgttatgacactgaaaaacagattcgtaaaaccgttgatgaattaggggtcgacgtttgttatcactatattcccattgcaaatgtttgtttaatcaatgatgatgcgattcgccgacgcaaagatgaccagaagttgcctgatattagtaatttttctagagcaacttatgaagcattagaaaattaccacgcgattaggctggcctatggcaacaaaaaagcccgtcaatacctgtatgaattacaaaaaaacttgagcaaagatgcttcagcttatacacctgagctgcttaagcggatcgcaaacaaattacatatcaaggatgcggatattcaggcaatcaaacaaactgattacctgcgtacttctattgaagaagatcaaaaactagccaaccaatggaatattaaagctactcctaccaccgttatctttaacgaagacaacgagcaaaatggagtattgctagagggaccaatcaatcaacaggatttagttaatctaatgcttccagattgtcaaaagtgtttttcagactatttacctgcggagcatcatttacgccttatctaaaggcgttttatttttgcaaaaaatcactaacccgatctctttcacctgggttacgccaagtagcaaaaactttatcaggtaaatcatcaagagttaatttgcgttcataaagcatctctcctattttcaatcctaacttttttttttgcataatttgctggcgtaaatattttctttgagttgcaatgttcaaagaatattcttttttgaatggcttaaagcgccaaaaatcttttatccccaattcatcaaggacaaatgatttactttgataaaccaatttattagctaccggttcttcgaaaacattatattttaagcaaaaacgatttctctgtggattaatttctaaatagtaattcccccaagctttattttgtcgaaagaaaatcaactgtgtgcgtttcaatcgccgtttcaaatagtgtcgctgtcccacaatccaaatatcttttacaccaattttttgataaagctgatgccgatggttaaattcttgttgactcaacggcgcacattgaacttcaaacgctaacttagcagttgctaagacatctgcacgcaattgtccttcagctaatggaatctcaacttctgccggaaaaccagctgccgtcaaagctgacttcaacagcattttcgattggtgatgctcctctttttcacccattaagttactgtacttcacaagatgcttaaaaaaggctgctttttgctccgacataaccaaaattacttttttattgcaatgtggacagtgataattatcacgattcaatttcttttgccttgcattaactaaacatgcttcgtcaactgcaaggactaatttcttatttaacatggctgcatacatttttctcacccatgttttattacgtaaaaaagagacggaattttgtcccgtctctttttctttaaagaatcttaataattagctgcttttaaaaagtaatgtcgaatctggcctaaagcattttgcatcaataagcatttgcctgtttcttcaactacacgcatcttatcactatcgaccttaaaaccaaattcgttggctattgtccacgcatctgctggtttaagctcctcatattcttcatcaagaaatgccaaatttaagaaatattgtccatgcaagtaatacaagctagaagctaaatcatttgccttaaggttatcagctaattcaattagactacctaaatcatcaaaatagtaagcctgagtcttgcgcgatctccaatcagttggctcattgtttttatcatcttggttaaaaaagttgtgagtagctggtccttgaggagccgaatttgaattcgtactctcctcatctaaatcaaagaaactttttgaatcatccgaattcgttgatgattgctcatccttaggaaagctatcacccattagtttccttaaattctgtgcatcgtccggcttaactttggtgatcatcaaatctaatcccccattattaggcattacttgaaatgatactggatcaccattggcaaattcatggtcttcatcgacctcatcaagaattttatagaagaagtcttgaatcttttgtctattacctaataaatcaagcattcccatcccacgacgagccaattcagctttatcaattcgaactctgatagtattcttatcaatatgatctacctgcacaggatctcacctccatgaattaatatatctattgtagcgtatttttcgtttaaaataaaagtgttagtctcaacaaaagccttaactaacacttttcaatcattttataaatctgcaatcttttgtgcttcagccaattccaaccgacgaacttttcgtggcaagaatcgacgaatttcatcttcattgtaaccaacttgaagtcgacgatcatccataatgattggtcttcttaacaagctaggattcttttctactaaatcaagtaactgatcaattgataaatcgtctaaattgattcgcaattgttgaaaagctcttgagcgggtagaaatgatttcctcagtaccattttcagtcatccgcaagatctttaataattcttttttagtcaatggttcagaaaaaatgtttctttccttgaatggaatattatgtttttcaagccacgctcttgccttgcgacatgaagtacaactaggagagacatataaatctaccataaaaatcacgctcctcagaacaaatatttgtatacgtttctttactcatagctagtataccatataagcttctttttcgtaagtgcttaatttatcgtttacctctgctatttacttaatactaaagataaaacgtgaattatttgtgaagatttcgttcgttttgtttaaaattattaaaaataaaaaaagagacatcacagtctctttttgcaaattaaaactacttgttcaattttttcattaaattattaactaatttttcgttgtcttcagcagtttctgatacataacaagcttcgttagctaattctttaatgtcagcagtgttcaatttcttcattaagcttctgatacgcaaaattgaagttgcactcattgagtattcatcaagtcccattgaaagtaagattgggaacatagtgttatcaccagcagcttcaccacacataccacaccaaataccgttttcatgagcaccatcaatagtgtgcttaatcaaacgaagtactgatgggttatatggttggtacaagtatgacacattatcattaccacggtcagcagccatagtatattgaattaagtcattagtaccaattgagaagaagtcaacttcctttgcaaattgatcagctaaaacggctgcagcaggtacttcaatcatcataccgacttgcaagtcatcaccaatcttaacgccttctttagcgagcttatctttttcttcagctaaaatttgcttagcttcacgtaattctgctaaagtaccgatcattgggaacataattcctaatggaccgtatgcagatgcacgaagtaaagctcttaattgagttctaaagatatccttgtattgcatagaaagacggatagcacgaacacctaagaatgggttcatttcttctggaagatcccagtaatcaaggtgcttgtcaccaccgatatcacaggttctgataatggtttgcttaccattcataccttcaataacttccttgtaggcatcaaattgagcttcttcagttggaaagtcactagagtccatgtacaagaactctgttctgtacaaaccaatggcttccgcaccattatcctttacacctggcatatcattaggtgtaccaatgttagcagcaatgataaatttcttaccatctgcagtaactgatggttcattcttaagcttagcccattctgccttttgcttaatgaatgcttcactcttttgcttgtaatcagctacttgagcgtcacttggatcaataattgcatccccgtcaagaccatcagcaattaacatatcgccgttcttaacatccttagtaattgagtcagtaccaacaacagctggcaattcaagtgaacgagccataatagctgagtgagctgtacgaccaccaatatcagtaacaaaacccttaacatactttttgttaagttgagcagtgtcacttggagttaagtcgtgagctacaacaattacttcatgatcgattgaagcaggatttggtaattccttaccaagaaggtgagccataatacgctttgaaacatcacgtacgtcagcagcacgttcttgcatgtaaggattatctgtcatcccttcaaaaatagcaataaacttcttagcagtctcatcaagagcagcttctgcgttgatctttgaatccttaatttcattctcaatggcaccagtaaattctgggtcatttaaaatcattaagtgtgcttcaaaaacttgagcttcttcatcgcccaagctttctttagcaatatcatgaatcttttcaacttcagcagttgaagtcttaattgcatcgttgtaacgagctacttcagcttcaacatcagcaattgaagatttagagaatgaaagatcaggctccacaagaagatatgctggagcaatagcgataccatcacttgcagcaattccttttaaagtcttggtcattattcagctaaaccttcttttttcatagtgtcggcaattgcgtccaatgcgtccttttcgtcatcaccttcagcagtgatagtaacatcagcattttgaccaacaccaagtgacataacacccatgattgacttcaagtttactgacttaccgttgtattccaagttaacatctgagccaaactttgaagcagcttgtactaaaagagtagctggacgtgcatgaatacctgtttctgcaatgatatgaaaatcgcgtttttccattataaatatctcctttaaattgaaaaattaaactggtaataaatacccattcgagtattagattatcatgtttttacagattagacaactgcaatgtaacagtttacattatttattcatcggtattcgtagcggtatacacaatcgcgccgcctctttctgccctaccggtaatatattgtctttttccataatttctaatagtcttttgaagatcaaacgcatcttttggctcaactttatactcttttatctcgcctgagactaattgatctagaattttctgataatccaaaaatatcaccactcttttaaaattttataatttttccactattaattctactcgtattatataaattaaatcgtattatataaattaaatcagtgataatgattattcttttagtttgtttattcgatcatcagatgctagtctctaattgtcattgaccttggtcaattggtataggttgtttccttctgtagctttgactacttttttagtctgccgcccaagcagttttactaatgacttactcacatgctgtatcgattctggctattactgattcagagcagattcagtcgcagctttttagcttgaacctatgaatacttatattttgcgagattgtcttagaatctgtaattagggactaacatgtgatgatcgatctatgaccaaatatttgctagaaaggaggccattctcaatgaaactttttatcggaattgacgttagttcaaaagatcttcaagtcgctattactgactcagaaaattatcaaaaacctttacttaaccaatctttttctaatgacctgattggtgctaatgaggtcaaaaagataattcttcaacttgctaaacagaacagctatgacaaagtaattatcggcatggaagccacttcaatctatagctttcaccctgcttatttctttgccaatgacgaagatttacaaaaaattaatcttgaaactgatgtcattaatcctaaaaacactaaacgatttcatgacgtttacgaagaaaataagaatgatcctactgatgcctattacatcgctgaatacttacgctttggtaaataccatgtcactattgctcggcaagaggaatacttagctttacagcgtttaactagagctagatatgaaatcacatcttcgctcactagagctaagcagcacttcattgaaactctttattatcgtgtaaacaaactagttaccgttgacaaagacaatattaaaacttctatctttggcgcaacgatgctgtcaattgttactgatagtaaaaccatcgatgaaatcgctgaaatgccaatcgaggatctaattgactaccttcaaaccaaaggacgtggccgcttctctgatccagagactttagctaaagcgatcagaaaagccgttagaggatcatatcgcttaggtaaagtcatgaaagactcgattgatgccgtattatctgtttactatgccgaaattaaaactaatcagaaattgattaagaacttagataaagcaattacagatatcgtccaaacgcttcctgaagagagaatactacaatctattccaggaattgggtcagtttattccgctggtattatcgctgaaatcggcagtattgaccgctttgacactgaagcacagctagctaaatacgctggtctagcttggcgtcaaaagcaatctagtaattttgatagcgaacacaaaccgatgactaaaaacggaaatcattatctaagatattatttggttgaagctgccaacctgattagacaaagagatcccgtttttcggaagtactatcaaaagaaatacgatgaagctttctattctccgcataaacgcgcttgcgttctttgtgcaagaaaattaaccaggaccattttcactctgctcaaaaatggtcaaatctatcaaacaccgaggtgattaattggtctaaaacatttttggaggagtaaataatagttgttaaaaaatcccttgaaatagggcttagtttcatgcacgcaaattttggttttaaaacaaactaattaaaaataaaatttaacttttacattgacttattaccacatgactatttatattcaattttcaaaaatattaatattttgtttgcggtaacaaaagtatttcttacaaaaaataagtgtttgagtcttagcacttgactaccaagagtgctaataatataattttggtacagttgaaaagaaaggcggtactatattttgctttgccaaaattgtcatgagcggcccgcttctattcaccttttcactaaggttaatggccaaagccgcgaaatagatttatgtcaacactgttatcaagaattaaaaaatcaacaaggaaatcaaggaaaaatgaataataatgaattttttggcgactttgatgatttattcaacgcattaaacggaaataacaacaatgccgcaaacaataataatgaaatgagaaataacgaccctagaatgcaaatggggggaggcgctggtaatggtggtcaaaacggcagaagcctacttgaccaatacggaacagacttaactgcccttgctaaaaaaggcaaaattgacccagtaatcggtcgtgataaagagattgctcgggttatcgaaattttaaatagaagaactaagaacaaccctgttttaatcggtgaagcaggtgttggtaagactgccgttgtcgaaggcttagctcaagaaatcgtagatggatcagtaccagcaaaattgcagaacaaacgaattatttcattaaatgttgtttcacttgttcaaggtaccggtattcgtggtcaatttgaacaaagaatggaacaattaattaaagaattacaacaaaacgacgatatcattctttttattgatgaaattcacgaaatcgttggtgccggtaatgctgaaggtggcatggatgccggtaacattattaagccagctttggctcgtggcgaattgcaattagttggtgctactaccatcaaagaataccgcgatattgaaaaagactctgctttagctagacgttttcaaccagttgaagttaaagaaccttcaattgacgaaacaattcgcatcttaaaaggtattcaaaaacgctacgaagactatcaccatgttcactacactgatgaagccattgaagctgccgcaaaactttcagcacgttatattcaagatagatttttaccagacaaggctattgaccttcttgatgaagcaggttctagaatgaacttaaccattccttatattgataaggataaaatgcaagaaagaattaatgccgcagagcaattgaaggaagaagccttaaaaaacgaagattacgaaaaagcagcctactaccgtgatcaaattgaaaaatatgaaaaggttaaagatcaaaaggtagatcctgacaagtcccctgttattactgataagatcatggacaagatcgtagaagaaaaaacaggcattcctgttggtgatattcaaaagcaagaagaaaaccaactgcaaaatctagctgctgatttaaaggctcacgttatcggccaagacaaggctgttgaaaaagtagctcgtgccattcgtcgtaaccgaatcggtttcaacaagtcaggccgtccaattggttcattcctcttcgttggtccaactggtgtcggtaaaactgagttagctaagcaactggctaagcaaatgtttggctcagaagatgcaatgattcgtttcgatatgtctgaatacatggaacaatactcagtttccaaattaattggttctgctccaggttacgtaggctacgaagaagctggtcaattaactgaacaagttagacacaacccatatagtttgatcttgcttgatgaaattgaaaaagctcacccagatgttttgaacctcttcttgcaaattcttgacgatggtcgtttaactgactcacaaggtagaacagtttcattcaaggataccatcattattatgacttctaatgcaggacaaggcattaagaacgctagcgttggctttacagcagaaaacgaagatgaagctaatgaatctgctagaaataatatgagccaattctttaagccagaatttttgaaccgtcttgatgatgtaatcgaatttaatgaattgactaagccagacttgcttaagattgttgacttaatgttgcaaaataccaacaatatggttaaggatcaaggcctacacattgatgtaactgctgctgcaaaagataaattagttgaagatggctttaatcctgccttaggtgctcgtcctcttcgtcgtaccatccaagaagagattgaggataatgtggctgatttcaaacttgatcatgcacaggctaagaatttaaaagccgatgttgttgatggtaaaattgtaatcagtgatgaagcaaataatgaataggatttaataaaagacaaagtccaagttataccaaaagatttcgaagcaatattcgaaatcttttttcttaaaaataaaaatatgctactcaatttgaggtatactaaattagaagaagtaaagctaacagaaacaggtgaattccatgcatttaattgatgtaaccaataattactctgatttggttcacagtcagctcaacactaccgatgcaaactatgttaaagtttattctcttggtaatacttcagttatttatactgaaagtaaggattctatcggtattgcacttgaaaaccatgaccgtcgtgttcgcgaagatgagattgaattcgtaatcaagcgtttaattaaagattatgattcttcatacactttgactgtagacaagagtcgtcatgtaatcgaaattcacgttgacaagtaatccaaatattgttgtatcaaaaaaggaggattgattcattcaattctcctttttctttttgctttaaagtttttctgttaattcaacatctggatatttgtcatggaagaaacgttccgcaaattcattttcaaataagaataatggattaccataacggtccttaactaataagttacgagtattagacatgcgtgggtcaagctgttccggatcaatccagcgcgcaacacgatgaccaatactgttcatttcaacttcagaattatattcattcttcattctgaattggaacacttcaaactgcaattgaccaacagcaccaagaatatactcatccgtttgataattgcggtaaagctgaattgcaccttcttggactagctggttcatccccttatggaatgatttttgcttcatcacgttcttagcagttactcgcataaataattcaggtgtaaattctggtaatggtggataaacaatcttgcgcttaccagcataaatactgtcaccaatttgaaaattaccagtatcgtataagccaactatatcgccagctaccgcatcagaaacttgtactcgctcgcttgacatgaattcagtcgcattatttaaacgaattggcttatcagttctagctaaagttacgtccaagcctttcttgaattcaccagaaccgactctaacaaaggcgattcggtcacggtgatgaggattcatattagcctgaatcttgaagacaaagcctgaaaattctggatcttctggacttagctcctcatccccattaactgtgtgactctctggtgctggagccaaatcaacaaagctgttcaagaatgtctcaaccccaaaattggtcaaagctgagccaaagaagacaggagtttgatcacccatagcaatcttctcgcggtcaaacttgttcccagcttctttaatcaaatcaatttcatccagagtatcctggaattgaggatcttgactaagtggctcactatcaggcaacttaccatcttgatctaatggtaaaaagcgatcttgatcatttttgcggtaaagctcaacacgattattagcgatgtcatatagaccctttaaagtttgacctgaaccaattggccagtccattgctacaccctcgataccaagcaaatcttccaattccgcaattaaatctaatggtggacgtccatcacgatcaagcttgttcataaacgtgaaaattggaataccacgttgcttaacaaccttaaacaacttctttgtctgtggctcgatacctttagcagagtcaattaccatgacagctgagtcaacggccattaatgtacggtaagtatcttctgagaagtcctggtgtcctggcgtatccaaaatattgatacgtttgccttgatattcaaactgcataaccgaactagtaacagaaatcccacgcttcttttcgatttccatccagtcactagtagcaaaattgccagttttacgtgccttaaccgtacctgctttacgaattaccccaccaaacaaaagcatttgttcagtaatcgttgtcttacctgcatcggggtgagaaataattgcaaatgttcttctcttttttactttatctgctaactctttgtccattagtcctcgctatcttcttccttttttgattcatcaatcgttaataataccgtcaacaagcgtgaccccttcatccttctagtggtcaaagtcatcccatcaccaatatcaactgttaacttttctcccttagctggaatcacttttaaagtattgatcacatagcctgctatcgtatcaacatcttccatttgaagattagtaccaaattgctcattaaaatcatctaatggcatcttaccgtaaataatgtacttatttgtagctatttgattaaaaagaatctcagtgtgatcaacctcatcatcaatatcgcccacaatctcttcaaccaaatcttcaattgtagctaatccagttacaccgccatattcatctgtcaaaattgctaattgtcgttgcgtttgctgcatttccatcaacaaatcgcccagctcggcagtttctggtgcaaacagcggctcagtcatgacatctttatagtcaagattatcaaaacccttttgtttagcctttcgtaaaaccgttctgatatgaataatccctacaatcttatccttatcacgttgataaacgggaattctagaatatggctcacgaaggatttcatctagattgtcttgaaaactgacttctcgatcaaccatgaaagcatccgttctaggtaccattacttcacgggctgtcttaccctgaaagtccaaaataccttctagcattgaaaattctgtatcatcaattttatgactttcatgtaaagtaacaatttctttttctaaatgatctttagtccccacttttttatcgccggataatctattttttaagcgaccaaacagagttcccgctccaggatcactattcattttcgtactctctttcttaaaaaagttatctaaatatagctattatagcatagagccaataacaattatgttaaaatagcacataagactaggaggttcgtcatgaaaaaaagtcatgtcttactcgtttttacatttcttttgctaattccctatatctgtagcttagctattattggaatcggctataatgcattagttttacattcagctgaactttatcgcacattaatcggctcattagttggcgcaatcattatgtttgctgtcaaggctactattcaacggcctgttgatttattagctgttcaaaccaacgatggcttactgaagcagcttttacgtttcttcagtatcagacggcgctactggcttttagcagctaatattatcttagactttgttctttgctttgctgctacctacataatacgtgctcttttaacacttgatcaaatcgtaggcggctccatcggctttgttttgttaatcatgtttgtttcaacttgtcttggcgcttatgttgaatacgataacctgtcaatcgaccctgagcagcattaattacttgctggccttcaagtacattacttgggccagtttttttgtatccatgtcaagatcccaagtaatatatggcgtgtcactgtcacccaaattttcatgtacttcaattccgctagcaactacttttttggcaaaatttggcacggtactagtcaacggtaagttgaaaaagactaaagtttgattctcttctacttcctccgctacctctgcagctggtaattcaaacttcattaaacccgttggcacttcatcttttgctacatctgctaaaacgccataccaatacataaagctgtcctcacctgataccactaggacagaacgcttattttctaaattatgatcagctaaaaatttttgaaaagtttcatcattttccatttgctgattagcttccataaagctcttttgagcattcatcaaaccagctggaaatggacgaccaataaataatcttgattcaatatttttcttcattttttctcctaatattctactaattcgtctaaatcaattatttcaccgtttaaaaaggcatcaatctcacctgatgaaaaaccgtgactaaacaaatatttttttattttaaaattgcgttcaatttctggaagatttctaaaacgcttgtaagccttaattccttgtttcttcaaagcttctgtttgtgcattctcatcttctttaagatccattgcatcaataataacgttactaatcccgctatcaaagccatgcgttaataatttagtacgcatcttacgctctaattcacgttgtgaaatcttgccaacttgatggctcatcgacttaatcacgcgttggcccacttcgagccaatcttcttcatcaatttcatctaacttatcctgactaatttcaggatcaacgcctttttgcgtcaactttcgtaataaaattttagggccatcagagccaacacgcaaatcatttttgataaacagcttggcatattgacgatcatcaagatagcctaattcattcaattgactaacagcactattggctgcttcatcagagatttcgtgtttttttaaatattgcagcacctcaaagatggtccgaggctcgtaactcaaaaaatgagccgctaaatcactagccttagcatcagcatcaaattgcctaatcttttcaacctgctcatcatttaattctttacctttaagcagcacaaattctgccaacgttttctctccggcagaaaaagcatattttccatcaataaaaacattatagcgacctggccgtttttgtgcacttactttggttatgatcaacttgtttcacctcgcatatttttctacatccatgctagcaaattttgctaaagcttgctaagaactttttccaggtagtacaattaattgaacacaatttagtttttagtagaaagaattaacgatgaacagaaaatttacccataataaaccaaaacatgaaaaagacgtcatcatcactattaaacgtttaggaattaatggtgaaggaattggttactacaagaaaaagattatcttcattcctggtgccttgccagacgaagtagtagttgccaagattgttaaatcatatccacactacatccaaggcgaactggttagaattaaagaaaaaagtccagatcgcgtagacttccctgaaggtgttgatcccgagattggtggcttagaattagtgcacttgtcttacgacaaacaacttgaattcaagaagaacaatatgcttgaatcattacgcaagtaccatcctcgtaattacaataagtataaagttaaaaatactatcgctgctcctgacccatggcattatcgcaacaaggctcaatatcaaattgaaaaagatcatggtcaacttaagcttggactttttgctccaaattcccaccgcttgattgacttaccaaagatgccaactcaaagtgaagatacacaaaaaacggaacgtaaaatcaaggttttaattgaaaaattgcatgttcctgttgccaactatcgtcgtcatttacctggcattaagaccgtagttgtccgtcaatcagaagcaactaaggaaatccaggtaaccttgatttcgatcggccacaagattaagaacttaatccctcttgctaaagaaattatgaaacttggtcatgtagtttctgtctatcagaatgaaaccgaatggcagaatccacaagtttggggaaataaaaccgaaaagcttttgggcaagaatcaaatcaccgaagaaatcttaggtaaaaaattcgccttatcaccacgtgccttcttccaattgaacccagttcaaaccatcaatctttactcagaagcattgaaatacttagacctaacccccgatcaaaccttgattgatgcctatagtggtgttggtaccttaggtattttggcagctgaccgcgttaagcaagttgttggaatcgaaaccattccagaggcagtcaaagacgcacaacataatgtcgagcttaaccacatcaaaaacgctgattatattcaaggcagtgttgaaaaggttttgccagaattacaaaatagtggtgttgcaatcaatgctttaatcgtagacccaccaagaatgggcttagctaaaagcttgatcaaaaccctcttgcgggttaaacctgaaacttttgtctacatctcatgtaatccctcaaccttagctcaagacttagttttacttagcgaggcatatgatgttcgggtcatccaaaatgtagacatgttaccacaaaccccacgctgtgaggcaattgctaagttagtgctcagaaaagatagataaatccaacaacctagtcttgggctaggttgtttttgtatataaaaaagcggctactggacaatcctgtcccttagtagccgcaatttcaagtggatgaggtagctcatcaattgatagtcacgatttttagttgtttggtatgtatttaaacaatggcattatcgcaaccaatattaacattcacttgttcgggtctttacataaaatgtaacttttaataaattggagtttttgcgaacagccaatgataattaatcaaataatttttaattaagctatttatggctgacacctctacgtatagagaatctttcaagtttccaataataatacaattctggagataaaaacttacttatatttttttatagttgttaacttttatttctacctcttccacactattcattatatctagttgtgaaaccgtttacaagaactaacccatatatttttgcaaaaatctttctacttgttgtcgatattgctttggatacattggataagacaaagcatgccctgcaagtggcgcaagccaaatttgcttttgagcagctgttgccgcataattttgccagaccatcttagttggcacaaagtgatccttgccgccatgaataaataaaaatggtcgcgtatttttatttaactgagcaaccgcagaagcatcttttaaataaaagccatttttcactctattaattccactaaccaaatcaactattggaaaccgtggaaaagccttcatatgaaataaattttgagcttgatagttaatttcacctttcacggttgaataaccacaatcttcaataaaagctttcacttgtggtggcaaaagcataccgcttaccatcattgccgttgcaccacccatgctttgacccataattacaattttggcatttgtaccagtttgatcaattacttgatagatccaacgcaaaatatcatctttttcagcccagccatagccgatatacttaccttcgctgcgcccttgggcacgtgcgtctggaacgagaacattataaccaaaatcataaaacattttggcaaaaccagccatactatctccatcactcataaagccatgtaataaaattgcggttttttggcatgtttatcaaggtactgggcgaacaaagttatgccgctatcagtttttaaagtccatgttttcttagaaaaatctctaaaccaaaccttatcacgataaagtggatccttgcctgataattctttggagtcagcttttttattaaacggtgtcatcgccatcttgaaaaagtactcgcttgccgcaaacaagccagctccagcaattaatgcggaagacaataatagtttctttttcatcttttaacacttccaaattcaattatttcacttttcattttataattaaattgctgaaaatttacaatccttatgacttaattatactgaaaaatgcgcttaacagacttgcttcaattaatcgatgacctgaacctgaatactaaattttatctaaagcatgatgacaaactacttaagtggggaaaactcactattgccgaaggaaaatgtctgctgctacccgggcaaacagcaatgaccaaacaaaaattgattaaattagttggccgcatgcgtggtcgcggcatccccttgttaatggtcattgaccaaaaagaatattccattttcggcctacagattcgcgaagatactggacaagcaattttaatgtaaaaagtgtctgggaaaaaactaagtctcagatcatgaaaaaagaacgttgaatttttgtttcaacgctctttttgtatacttttagctccagccttgatattattaaatcatcacaaaataaaaaaggtggaaactaacatgtacaagaattatatcacaggtcaaactgctttaacacttaatctagattttgccattccggccaatcatttggctaatgtcatcagctggtttgtagattcaattccagaagatgttttagtaggcaagactgctaaaacgggccgcccagcctatcatccagccatgatgctcaaaatactgctttttgcttactccagaagagttttttctggcagaaagattgagttgatgctggaagaaaatctgccaatgatgatcttggctgaccagcaaaagatttcatatcatactatcaataattttagatcaagcagccatgccaatgaactgattaaaaagagctttatctacttcactaacctgttagaagatgaaggcttaatcaatgaaggtgctgcttttatcgatggtactaagattgaagctgatgctaaccgctatacatttgtctggcgcaaagcggttgaaaagtatcatgaaaagctgaaaggccaggcagttgaactttatgatgaattgattactaaagaagtagtcaaagaaatggaaaaagaaaaagttcaaactagtcaggggctaaaggaattagctcaagaaactgaagcagaaattaacaagctgactaaagagattgagcaggaaaacaaagccattcctggcggttcacctcgaaaagccaagcgacgtggactaaaaaagattctgcaccggctaagaaaagattatgtgccaagaatgcaaaaatatgaagaagccgaagagatctttgccggacgcaacagttattccaaaacagatcatgacgccacctttatgcatatgaaggaagaccacatgaaaaatggtcaattaaagcctggctacaatattcaagcagtcacgaccgatcaatatgtagttgattatgccatctttcctaatccgacagatttcaaaactttggagccggttttggatcaaatgaccgtgttggacaagtttgacaaaatcgtcgccgatgctggctatggcagtgaatacaattattcgatgctggaggaaaaatatccagacaagaagtactttattccctacactatgtatgaaaaagaacagaccaaaaagtataagaatgatccaactaagctaatcaactggtactacaatgaaaaagatgattattacattgatcatcatggcgtcagattcaatttcaaatattacagccagcgcaaggatcgttctactggtcaggtccgtgattttaaggtttatgaggcagacgagttccagctaacgccagaattggaacaattggctaaaacagctagcggccgccagcgccaagttcgctataatcctaactggcaatatttaaaagaaaaagcaaaagaagttctccaaagcgaagaaggcagacacatctatggcatgagaaaatatgatgtagagccagttttcggacatttgaagaacgtatttggcatgcgcagaacgcacctgcgaggtaaagagaaggtcgaaaccgatatcggaattgcctttatgatgatgaatttgaacaaatattgtcaaagaaggtggctgaagggccgatttttattgttaaaaattttaaagagaacaaaaaaacgatcaagattcttaaaaaaggaaatcttgatcgtttttattcatctggaagctagttttttcccagacactttcttattcttttacgcggtattgacgaatatgatccttagtaccagcaaaataccaagtacctacttcatcgtcgctagttaattctaagccatcctcaggatctaacaaagccgtattgaagacgtcttcatattgcttaactgtcagcttcttccgccgatcaagcattgcttgatcagctgtaggatcaacttgtttttcatatccttcaaccaacttgccactataaaactcagccattgcacctgaaccatatgaaaacaggccaattaatgagccagcaggtaattcaccattctctagcaaactaagtaaactcatataaagtgaagcggtgtagatattacctactcggcttgataattgtttagcagccgcaaaactacgctccaacttgatcattgttgcttgatcttgcccctcaatcgcaatattattagcttttaagcccatcttagtaaaaggtaaatgataagtaattgcatcaaaatcactagtctttaatcctttttgcttcttataatcagtaaaggtcttcttgaagaaatccaagtaaacttgagtcgaatacttgccgtcaactaaagcggtgcgagaataatttggtctccagaagtcgttaatatcttcgctgtaagctgaatgaccattatttagggctaaaatgcttgggtcagctttgatgagcattgccacgctaccggctccttgtgttacctcaccagcagtattaacaccatagcgagcaatatcactaccgatgacaattgcggtttgttcaggatgtacccgaacaaaatcacgtgccatcattaaggatgccgttaaaccaaagcaagcttcctttacttcaaaagttcttacttctggcttcaactttaaggctgtttttacaaataaagaagctgactttgattgatcaatactactttcagtcccaaaaattaatagaccaactttgttcttatcaatcttgtcaataaactttaaagtcgcattaattcccattgaaactgcatcttgcgtaatatccgcaacactcatctctctttgaccaatgccaactaaaaacttattttgatcttgctttcttgcgttcgccaaatcgaccatatcaacgtacttgtctggcgtaaaaagtccaatttgatcaatacctacttgcattatttttgctaaaagctccttagcatgactttcagaataatttttttcactaatcatcgcagctagtagctgcttgcgctcatgttcattatcggttaactcagcaaccacatttctcgcctgcagtttcatatgtcctgcttgaatgccaacagtagaaattgccagcaaagctgctaggttgttggctaaagccacgctaacaataatctcagctagagttttactcgtgattttttgtcctaaaatagcaaaactttgttggacgtcatgacgggccttaattgagccaccaactactccgatcgccattggcaacgttaattcgccaactaaataactaccctgcatcgtccactttgataaactgcgatattggccatcatgattggctaaaactgcagtggctgcttcaattgcccgataatcattgcctgtggcgattaagacggcgtcggctccattcatgattcccttattgttagttaccgcacgataaggatcgtcaattccaatttttcctaatagagcaacacgttgtgcaacttgcatcccaccaatcgtttgtggatcaatcttcactttagccgtggccaattggctaggataatttgataaaatcgcaaataatttttcatcaacaccagcataattttctaatttagccgctaaaaattccaaaatcgagttggttttattcgcgcccatcgcctcagctggatcaaccaatacttttaagtaaagcaaatcctctttctgcacagcagttatttttctagtaccaccaccatgacggactaagctggaaaacttttgattagctaattcgactaagtgcggaaattctttttctaattcaattaatgaaaaagaattgttgaccttcaaaacgatttgaccataaatcccttgtcggtcgctgctagctgtcacaccaccatttctagcaaagatactagctccatgattggcggcagcaactactgagggttcttcaacagccattggcacccaatatttttgtccattgactattaagttttgtactacgcctaaaggcaaacgcaactgccctacaacattttcactcaattcatctagacgtctcagaaccgcatcatcgatttgctctaatgcaataccttcatcctgcaataatttacgtctagcttcaggctctaattgataaaatttcattctgcattctcgatttcataagcaatcgcctgaccgccaccaatacacaaagtaaccagggcacgtctgccttttctcttctttaatccactaattgcactagcaactaagcgtgtacccgttgcacctaaaggatgacctaacgcgattgcgccacccataatattcaatttatcagttggaatttgtaagtcgcgagctaccgctacactttgggctgcaaaggcttcatttaattcgataatatcatagtcatcaaaattacgccccgtcttcttaagcagttttttaactgcataatatggagtataacccatcagtgcaggatcaaagccagcttccgcaaattcacctaacttggcaatttgcgttaagcctaactctttcattttctccttagttgccagaactaacatacttgcaccatcagtcaaaggagacgagtttccggcagtcacttcaccatccgccttaaaaacaggctttaagttactcaatgcctcaagcgttgtatccggacgaattggttcatcatgatctaaactttgaccatcaatctccacatccaggatctcattatcaaaaaatccggatttaactgctacagctgcctttttatgcgactgcaatgcaaattcatccatatcctgacgactaacatgatatttttctgctacgttttcggcagtaattcccatatgcttgccagaaaaagcatccatcaaaccatcgttaagcatagtacttactaggtgatctgctggatcatttttgttttcttttttaacaaaataaggcgcattagtcatgctctcactaccgccgacagctactagatccaaatcgcctagttccatctgtccttgagctagacgtaaagctttcagacttgagccgcagacttcattaattgtaacggctgcagaagcttcactcatccctgaatgtaaggcaacttggcgagccatattctcacctaagccggtatccaaaacattccccataaacagtgcttgaacatcagctggcttaatattgcccgccttcattgttcctttcaaggccattacacccaaatcaattgcagaagcatccttaaaaaatcctcggtacttgccaaaaggtgttcttttagctgcaacaatataaatgtccttcatatattttctctccattctccataatgtgtattttttaacaaatatgataatagcaaaaaaatattaagaaaaacataaaaagactacgccgcagcgtagtctccctaataattaagcttattttttattttgcttaccttcagcttcaaacttcttgctcaattgcatgatatatgcccgcaattgttccttaatttctgggtgcttcaaaccatattcaattgaagtttcaaggtagccttctttgttaccaacatcatgacgttcgcctttaaaggcatgagcaaagacacgttgagtcttgttcattgtatcaatcgcatcagtcaattgaatttcaccgccacgacctggtttttggttagccaaaatatcaaaaatttcaggtgttaataagtaacgaccaataatggcataatcactaggtgctttatcaatatcaggcttttcaacgaatgacttaacattgatcagtcctggcatgatctcattttccggttcgatgacaccatacttagaaacttcttcatgtggcacaggcataactgcaattgtagaagcatgcgtcttgttatagcgatcgatcaattgcttggtcaatggcaccttatcttccattaagtcgtcgcccaacataactacaaatggttcatccccaacaaaactgcgagcacggaagatggcgtctcctaaacctgctggatgcggttgacgagtgtaatacaagttaacgcctaaatcagtaattccttcggttaggcgaagcaattcttttttacccttttcttccaaatcttgttctagttctggattagaatcaaagtgatcttcaattgggcgtttgttcttgccaattacaattaaaatatcttcgattcctgactttttagcctcttcaacgataaactgaattgttggtttatcaacgataggtaacatttccttaggtaaagccttagttgcaggtaaaaatctagtacccaaaccagctgatgggataacggcttttcttactttcataaaagcacactttctatttcaattttataagttcatcataacaaaatatgcatttttcagctacttagtttttcgtcttttcttttgaatataactggcaatacgaccagcagaatattcaacttgtccaacacggtttcgcacaatagcagcgttaacaccaacgccaaataaaaataatactgctgcaatattcaaccagagcataaagatgataaacgtaccaacaatgccataattctcccaagtaatcgggaaatggtgtaaatagaaactaaaaagaaatgatagggctaaccagcctacaacagttacaaaaactcctggccaaattactctctttttgagttttatattaggcaaaacatagttcaaataccataatgctagcatcataaccaatattaatactggatagcgataactaaagattttgctaatttcattaagtggtagctgaaaaatcggtcctaaaaagttgagtacttgttgcccaaaaaccaaggccaatgtagcaattgtaaatactagaatcatcaatcctgtaaaaacaaaagtaatagttctagtccaaagaaaattaagcattgataattttaattcaacttgatgaaccccataaagtctattttctccaagacgaattgcattaaccatatttgataatgaccaaactgcaaacacaataccaaaagaaatatagcctgttgatgtcgttttcaataaagaatttataattggcataatgaattttgacacttggtctggaaaaaccaagttcaaatattcagcaataggcgcagtatcaatgtgaaacaacggtaacacgttaccaatgataataataatcggaaaaatagaaaacaaaatgtagtaggcaataataattgaactagcaaatatctctccttgagataaggtggttcgtaatgtagaaataaattgcccaatttttaaaccaaaatggtttttaccatttttcatccattatcctaatcatccatctcatcaaagtgagggatgtacttttctaagccatcgtaaggatgctgcagggtcaagatcttaggaccatcttttgtaattgcaaaggtgtgttcaaattgagcagcattagaaccatctggagttgcgtagtaaacccaatcatcgttaggatcatcaacagtacgttggtcgatgtgccagtcgccaccagcttctaccataggttcacaagtaatagtcatgccttcacgcaagcgaagaccatgacctgccttgccccagtgaggaacttctggatcttcatgaattgatggttgaataccgtggccaattaattcacgtacatcaccgtaatgattttcatcttcaacataatgttggatagcagcaccgatatcaccaattctgttacctaaaacagcttggtcaattccgagatacattgcttttttggttacttcaattaatttcttatcagcttcggaaatttcgccaactggataagtagtacatgaatctgattcataaccgttcaagttgcaagttacatcaaccttaacgatatcgccttcctttaagatgcgatcttttcttggagtttggtgggcaatttcatcgttaaccgaaatacaagtaccatacttataaccctcaaaaccttgttctgaaaggcggccgccacgacttgatacgaagtcttgacaaaactcttcaattttccaggtagaaatgcctggcttaatcacatcacgtaagccttcaaacatagttgcaagaagatgtcctgaagcttgcatgcctttaagttcacgaattgatttaattgtaatcaaaataatttctcctttataaatttttatttagtttcagatatttctattataccgttttccaaaatacttttaaaaggtcgggtttttgtagaatcaaaacaaaactctagaaatacctgaaatatttttaaagtttgctaaaactaaacgtttttgcaatagtttcatgtataataaggtgtcgtataatgcagtgaaaggtatgaaaaatcatgaaagcaagaattgtttatgccagcatgactggtaacgatgaagacatggctgatattttagaagaagatcttcaagattatggctttgacgttgaaacaagtgatgtcggcttcactgatgccaatgactacttagatagtgatctttgcatttttatcacctacacctatggtgaaggcgtaatgactgatgaattggcagacttttatggggagttaaaagacttagatctaacaggcaaacattttgctgtgatgggttctggcgataagacctacggtgaacacttttgtgaaaatgtttttgactatgaaaaagcattcaaggattgcggcgcaactgaaattactaaacccgtaacaattgaaaatgcgccagatgatgatgcagtcgctgcaatcgatcaagctgcaaaggaaatggccgataagttaaatggctaataacaaaaaagacgtcacagctgttgatcaggcacaaatacgccgtctaggtcaaaaattaatcaagcgacaccgtaatctttgggtttacatggttttcggctttgtcgctgcattaatcaataccttagtcttcatggtcttacactcatggtggcataatgtgatggtaatttctaacaccatcgccttcatcgtctccaacctggcatctttctggtttaaccaaaaggctgtttttatcaataatgtcgatcatgaacacagcacgtggcataaactaatcgtctttttcacttatcgcgtcatcagtttaatccctgatacattaattatgttagtcggcttatcctggctgcatttaaacgcattactagtcaaaattatcgaccaaattttagtcggtgtattcaattacttaactactagatcagtctttcaaaagcaagaacatactatgattgaacgtgcaaaaatgcgcattcaagaaccaaaaaataaaagagacagcaaaaattaaacaatgtcattaagttaagacattgacaaattatcgacttggacttttaagatcattcatttgcgatttatcgcatttgaatgctcttttttcatgccaaataaacccaaatcttgtttagaaattaggctacacgatataaataatatacagctgatttgggtttgagatttcttttgtcttttcgtcctggtctgatcggaattgtgtaatgactaatttgaataagaatctttttaaagatttcagttgaagaagaaattatatacatagcctggatgacaaaacatgactgtttgaaattgatcgcatattgatacttgcattttttttgtggtacatatgcttgagcatcaatttgactgactgcgttaaacataatcatgtgggcatagatctccatttcaataaatctatcctgcttggaatgaaactgtacgctacctaaagcatatttcaactttttgaatgaagtttcaatgccccagcgcaaatggtagatttctttgatcctttttaagggataatcggctctatttagattagttagaacaacttcccattcttctttgcctgatttaggatcattaattctaaatttacaggcacgaaattttattgtacataactctccaaagtcccagctgccatctttggtatttttagaccgatattttatatattgacggtaatgatggttaaccaaatgaacgttttctgtagccttatgggtttcataataataattagaggtagtcacccagcaagctatatccttatcacactcttgattaggcaactcagctacttccttaaatgcgccatatcccgttttagtacgtatgacataataacagttaggcaggcgattacaattttcaatcatgttaaagccggtataacctcgatccatagtaactatatatggtccgcaatttagctttttaagcatttgaacggcggctttacgttcatccatctttgacttaggctgaaagatgcagtcttgataagtattatttaacaggtcatagagtgcattaacatgaatttggcaatatggctttcctttatgattgagatttccaacgatattctctgatttaggattccagatttgattaaaatcagacccatcaatggcaaatatacgatatttatgatcaaataactggatattaaataaattctgattaaatacagttagaatatgcttaaaacatgcgggtgaaagctgacctttgcgttggacataagcggaagtactgactactttatcgttatttttaatagctttttggccaaaagctctaaacaactcactggtcaaatcttttccttgcatattaatagtagttttaatgactgtagctgcatctaaaaaccgcttcctagtgaaggcatgaggatcatcgataaaatcatgaatatgctttccagtatcattgataatttgatcaagacgatctaaaatatttctgtgaagggctttcataattaacaccagctttctggcaataattttgaaggtttaataatttaatcagagggcgaaaaggtaggttcttttcgcctttattttatgcaaaaaaagaaccaaatcataatgattcggttctacagagattagattcaatttgtcaatgtcttaacttaatgacattgaaaaattaaaactgtctctttatttttttactcaaaatcttttggtttactttcactatcttgattaaagtaataataaatatcatccataattcgatcagctgcatgtccatctccatatggatttttggcattcgccatccgatcatattcgtttttgttttctaacaaagctagcatttcttcacgcaccttgtcgacttcagttccaactaacttcaaggtaccggcctttacgccttcaggacgttccgtcgtatcacgtaaaaccaaaactggtttacctaaactaggagcttcttcttgtacgccacctgaatcagtcatgataaagtatgaacgtttagctaagttatggaaatctaccacatcaagcggctcaatcaaatgaatccttggatcaccaccaagcacttcattagccactttttgtactcgtggagataagtgaaccggataaataatttctacatcaggatgcgaatcaattacttgccgcattactttaaatactcggcgcattggctcaccttgattttctcgacggtgcatagtaaccaaaatcaccttattaccaggagtaattgcgtccattacctcatgatgataatcttgttgtacagtctgtgctaaagcatcgattgccgtatttccagtaacgaaaataaaatcagaatggtgattttccttcagtaaattagccttactcaattcggtcggtgcaaaatataaatcggctaaatcatccgtcatctgccgattcatttcttcaggatatggtgaatacttattccaagttctcagacctgcctccacatgtcccaatgtagtttgctgataaaaagtagctaaagaagccgcaaaactagtcgtcgtatcgccgtgaaccaagacaatatctggtttctcttctttgatcaccttagataaatcaatcatcactttagaagtaatttcttctagagtttgattttggtgcataatattaaagtcataatctggtttaattttaaaaatatctagcacttggtccaacatttcgcggtgttgtgcgctaacgaccgttacttcttcaaaacgatcatctttttttagtttcaaaacaagtggtgccatcttgattgcctctggacgcgttccaaaaacagtcattaccttaattttcctcattaaaaaattcctccgcttaactattttactatacctgattttagactatcttgcacccgctttctgtgttttaatggaagtattaaattgaaagttggtcgatgcatgaattcatcattactattattaattacaactggtttaattattttgattggaactttttgccttgtttttggtatggacaaaaacagacccgctaaaactagaaaatatttactttatactgcactaatctgtgttttcctagtttggggcttaattactgcaattatgcttcaacccttaggataataaagataccttttggataaccaaagcatgtaaaaagcctgcaagaccaatacttgcaggcttatttctatgaccccggtgagattcgaactcacctctacggtttaggagaccattgttctatccagatgaactacggggtcaaacctaagattaactttaccaaaaaaagtggtaatagttaacctttttttagaattgtggattaaaaaatgttttcggatggttggtatcagcaatcttatcagctgctttaacaaaaggcatccaaattagcaaagtaacaatcatatttaaaatgcttaaaacaattgcacgccaatcataattgcaagccagaaatgggccaataactggtggcatgatgctaggtactgccacttgaactggattaaccaatcccataatgctaacccaataagaaaaggcaacattaactagtggcgctaatacaaatggaattagatacactggatttagcactacaggcaggcccaagagaattggttcgccaatgttaaaaattcctggagctagtgagattttggcaattgtgcgataatcactgcgtttagaaaacattaaaatcgccacaattagcattaaggttccaccagcaccgccaaaccaggcaaagacatcaaatgagccacgtacccatacatatggtggaatatttccattactaatcgctgtgatgttatcattttgagcagtcatccaaattgaatccaaaattggtgatagaacccctataccattaattccaaaaaaccaaaataactgcactaataaagtaatgacaattaccctaccaaagccttgtccccactttactaatggagtttgaattgtggtaagcaaccaatttccaaaatatttaccggtaagaatttggaacaaataattaattccgcctacaccaaatattgcaatcattgcaggtaataaagaatcaaaagcagcttgttcagcatggggcaagttcgatgtcacatgcaacataatccttgctttatagcaagcataataaataaaaaagcctaatgagccaaacaaaatagcagtaaagaggccagtagttgagaactgactaatgtcaaatgcattatgcagtgtaacattatcaccatgaaatttaatcttagctatattggcaatgcttagtgcaaaagaagataatgccacaattgaagcagcaagtctatttccttcaaaagcttttgctagttgatagcctaaagccaatgctaagaaaaaggcaaataatgaaaatgttcctcgccaaactaaattactgattgctaccaatggctgtatcgcaaaagcaaaggcataccagcctaaatgatcatgagctgcttcaattaagctcttaattaaaactgctaatgatcctgccattgtaattggcattaatgagacaaatgcatcccgtaaagcaactagccatcttatctgaccccatctactagctagcggcaaaacatagtcctctagccatctaactaaacgaatcatttctttcctttcaagtaatgtggatgatatcccttgttcttattacgtttcttgcgttttttagttttatttttcttagtcgaagtcttaatgggctgctctttagcctgcttcttttccttcttgagtttaggcttttcagttgttaaatgatagcctgcaaagtagacacgctctatttgtaattgatctgccaataatttcttcaaatcacgaaaatcgtgatcatcgcctaaggtaaccacataaccttcagcgttcattcgacctgttcttcctgcccggtgcatgtaagtattagtctcgctcggaatatcaaaattaatcacataggtaaggcctggaatgtccaacccacgcgcagccaaatccgttgctagcagcaatttcgtcttaccagtagctaggtcatttaaggctttttcacggcgttctttaccaaattcattagctaataattcgaacttagtcttagtatgcccaaaaataccagcaaagcgcatcatcgttttatttgaatcaaagaacaaaattcccttaaagtgatccaacttagtcattcgctgcaaaaattcaatcttgtgttgattgtctacttgcaaaaaataatgtttagtcgctgaagcttgttcatttctgacatctactaacaagaaatgacggttaaaaacttgctccgcatcccgtgtaatctcagaatctgttgctccaaataataagatttgactgtctggacccagattttgccctaatgctgataacaattccattttagtaaattctaaaatatcatcggcttcatcaataatcaaagtcttgatctggtttactttaattcgaccacttgagaagaagtcaaaaaaacggcctggtgtagctacgaccacttcaggatgctttttcttcagattgtcttcttgtctctttctattgccagcaccaaccaagctgacgccttttaatcctaaagcgtggatgtaaggattaattgcatgacgaatttgtacagctaattcagtcgttggcgcaataattaccacgctgttagcattacctggctgtgctttttccaaactaggaagtgcataagccaatgtcttacccgtacctgtcttagccaatccaaccaggctcgcaccattgcgaatggcatcatagctttctttttgaattaaagttggctggtccttgtgttctctaattaaaacttgtttgattttttcttgatacattattactgtgttaattgcccatacttttgcttatattgaccaacggtcccgttatacgcgtacatcgttacctggctttctaagcctgaaacattccttacgcgtccgttagtagtgtagcaccaaaatgaatactttaatttattcggtgccttactatctgatgacataaataacgtttgcggattaaagtaatgttgatatttatgatcaactttcaccatgactcttttgccagctgcttgcaataaagccgcaaactgccccattgaccgcaaatatctcgctgaacgagtagtcactgccggtacaattagaattggcagcgagcccgtattttgtcctacttgcttaaaaaaagtagcggtaatgctgcatcggagtcgattcattgctataggaaatctcactaccaaatgccaagttcgttcctaaaatttggtcacgataagacagatagttttcatcaaaatatgatctgccttgggttgctttcaaatatataaaggaaacgccattagattgcaatttatgtaaatcaacatagtcaatatcttgatttaactcaatcccaatcgcacttgaattagcatctggcggtaaagttgtttgccgcttaaaattgaaaaagccaatcaaaagaaatgcaatcgccagaattaataaagtcaaaatcgctggcaaagtatacttatgctgaaatcttttcatcggctaaattcctcccttaattattttaaccgaaaagcctatcaatacaaaaatttccgagactgtaaaatagtttgtgtaaggatgaatgattccttaaatttatttctttaaacattagaaaaaggagttcctttctcgtatgattggtttgaacaaaaaaaacacatacagaaagaagaactccttcatgaatgattttaccaaagattttgctcaagctctattcaatccagacaaaataaatgatttattgcgcaaagagctacaacaggctgttaataacttgctagaagctgagttgactgcctttctaggctatgatccctatgccagaaatggctggaatactggcaattctagaaatggtgcttatttccgcaaggttgatacccagtttggaccaattgaagtgcaagtgcctcgagaccgcaacggtcagtttcatcagcacacgctgcctgactacaagcagcactctgatgttttggaaagcacgattatcaagctctactccaaaggcgtaactaccagagaaatcgctgacttgattgagaaaatgtatggcagtcattatagtccagctcaagtatcaaatatttccaagcagatgctccccaaggttgaggcttatcacaagcgcaagctaagcgacaagtttttctgtgtctatttggatgcgacataccttcctttgcgccgagaaacgtttgagcgtgaagcagtatatattgccattggcattaaacctaatggacataaggaagtcattgactactgcattgctcctagtgagaacattgaagtctggacagagatgcttcaaaacatgaagtccagaggcttgaagcaagttgaactctttctttctgatggtgttgttggcatgaaaacagccttggccaggacttatcctaaagctcattttcaacgctgcctggttcatgtcatgcgcaatatctgtgctaaagtccgggtggatgaccgcgaaaagatcatgaacgaattcaagcagatacatcaacagacaagcaaaaaagaagctgcagctgtcttgcacaaattctatgccagatggaataaagcttatagccatgtcatcaaaggtttgaaggaaattgagcccgatctgctggtcttctacaattatcccaaacaaatcagagcttcaatttattcaaccaatatgattgaatcctttaacaacgtcatcaagcgtaaagctaagcctaaggcagaatttccaactgaacagtcgcttgatgcatttattggcatccaggcaatgagctacaatgaccgctatttcaaccgaattcataaaggctttggtcaggttcaggataccttagaatcttattttgaataaataattaaaaaatcaatttacgagaaagaactatttacacaaaagatttgacagtttcaaatttccagtcgatgtgctaaaatttaaataatgtaaacgaagggcaacaaataaatatgaaacgacaaatctcatttggccaagcattggctaccgtagtcggttctgtcatcggagctggcgtatttttcaagatcggaacaattactgcacaaactggcagcacttcaatgaccctgtttgtatggattttagctgggatcatttcaattgcatcaggtttgaccatttcagaaattgccgccagcttaaaaattaatggtgccattaagtatcttgattacacttacggccgcgtgtggggttttctttttggctgggcacaaatgattgtttattttccagctcaaattggtgccctaagctcaatttttggcgttcagtttgtctccttatttggaattaaggcgaggtattctaacctaatagctatcttgctagtgctttttctcttaggaattaatctaatcggaactaaattttctagcaaaatgcagtcggtcatcactatcctaaaaatcattccaattgctttaattattatttggggattatttaatcctgccaaaatacctgcaccaattattccgttaacagtcggcactggacattcatttccaaccgccattagtcaagggttactttctgcgttattcgccttcgaaggctggattgtagtgactaatttggctaacgaagtcaaaaatccagaaaaagacctttcacgggcaattattttaggtctttcagcaattacattgatttatgttttaatcaattatactttcatgaccgttttacctattgatcaattaactaataacaataatgccgcgtttcaagcttcaatgaaattgtttggtcaatttggtggaaaactagtcactgtgggaattttaatttctgtttacggtgcggttaacgcattcatgctgacagggatgcgcacgccttatatcttggctcaagacaatttattgccattctccaataaaattggcaaggctaatatccataccggtgttccagtagttggcgcgtttattgttgatgctattgcaattgtcatgattctactaggtaattttactgttttaactgacatgctagtcttcgttatgtggactttcaacacaatgttgtcagttgccgtaataattttgagaaagcgtgagccagaattaaaacgtccatttaaggttccatggtatccgatcattccaattatttccgtgatcggtggtatcttcatcgttgtctcaacaattatcaatcaatttgttctttcaattattggtattggtttaacattgttaggactgccaatttactattacatgcaaaagaaaaataattaacgaaaaaagccgccgattttgggtgactttttatttgagtaaatatatttcctgaattgtcaaattaagtgcaacagttaggttatgaagagatatattgcttgaagagtttctctgctgtgtgatattggaggattcggcgatatttgtggttaatggcatcagttgcctgttgaacataagcttttgacttgtctttcatgctcttgctcttagggaagaattgacgcaaaagaccattgcagttctcattggtgcccctttcccatggagaatatgggtgagcaaagtaaatctggcagcccttgatcttggtcatatccgcaaactcagagccattgtcaaacgtgattgatttaaaccaggcaggatgtctgtcaatctccttttgaagcagcctttggcatgtgcttgcccgatagtcaggaatcttgataactacttcaaagcgtgtggttctttcagtcaaagtcattaaagcaggctgattcttgcgtctgacgcctttaaccagatctccttcccagtgcagcggagcttttctgtcttcaatctctttaggacgctgttcaatggaattgccaagatgcttcttgtgcaaagcgtgaccgccatggctgtgatgacgcttgttcctgcgtcttttgagcttcataggcagatcaatattgcttatgtccagcaagccctgatcaatatagcgatagacagttggtgtgctgggacaagggtagcctggcatagtccttttgaattcaccaacgaactcatcgatgctggtggcatcaaatttagctttaaagcgtctggagagcattctcaaaaagacagcataatgcttcaatggattgcgctgatagcagtttttgcgacgcttctcataataaatctgtgcagtatcagcgtaatagtgctcatacaataaatagctgctgtctctttgcaggacacttccgcgtttgatttcgcgactgattgtcgacttatggcagccgacttcttgagcgataacagtacgggaagttatgccggaatccagcattgcttgaatttgtccacgttgtacgctggttaattgatgatagtgcttagaaatgctagaatttgaattggtcataaagatcttcctttcttgatttttcgtcacttcaagtttaggtcttcatggcctttttgtttaacacttagtgttgcacttcaattttaaatccggggagtaaatatatttattaatgttgtgaagcaccgctagttgcatcattttcttgatgatcttcataggcagtattggcagcaattcgaccaaaagtgaaaatatctgccaaggagttaccacccaaacgattaccagcatgaatgccaccagcattttcaccagcagaatatagaccatcaataatttgaccatctttattcaaaacatgtgccttagtatcaattactaagccgcccatagtgtggtgaatagcaggctttctcggagtagcatagaatggtgcaacttcacatttgaggcctaatacattcttatggaagtctggatcctcgccacgatcaacgtaagaattataatcctggatagttttaaccaaaactgctggattcattccaatttgttttgccaaatcttcaagcgtatcagctctaaacaaggttccagccttaacttgcgcatcaagtgactcttgggttgtattgtaagcagtgtccttaatcttatcgtccgcaatttgataaatcaaaccaccattttcgataactgccttagccaaaacatcccgttccgcaaattcattaacaaacctcttaccctttttgttaaccataatatagttagcaggcggagttacaacaccagtgaaaagctcaccggtctttggatcagctactggcattaattggataaagcccataccgaataagtctgcaccagcttcaagacctaagttaatcccatcgccagtaattgcaggtgaattagttgttgtactatcgtactatcgtctgcaatgtttggccaataggtattgtatttttgaaccatcttagtattggcaccaaagccacctgccgttaaaattactgccttagcatgcacagtcaaagtactaccgtcagcgcgtgtcgcaattacaccgcgtactttgccatcttcaataattagtttttcaacacgagtttcaagatatggatcgacaccatgctctcttatccaatcacccaaaacgtgaataaaggcataacctaatggctctactggcttatgacctctgcgccacaaaccaccaactggttctgtaacttgagaattatcaaacttaacacccaaatcttggagccatttaacagaatttaaagcattagttaccaattcatgtaccaaagcatatttaccatgaatttcgttaccttttaaatcagtccttttaccacctaaataagtttgaatttcatggagtaaagtcgaatcaaataaataatctgtaccagaatcaatatattctttgatttgtctttgtaatctttcaaaatcaaagcggtattctaaatcaatttgttcaattggcgtattagccaagtcttctaaagtctgtttttcaccaggaagagccttaaatttactttgccattctggttcagccgcattcattggaccaccagcacggctagtattaccaccgatctgtggatacttttcgagaacagccaccctttcaccatgttgaattgagcgaactgcagctgctagaccagcgccacctgcaccaactacagctacatcaacagtaatttcttcatcttctacctttgtagcagcgggcttttcacggtttttccattcggttgaatcgccgcctgcttcatcaattgcttcggctacgccatcaatcacaccatgactggaaatagtcgcgccactgaccgcatcaacgtttaaagtttgattttccacaattgttttaggcaaacgtctaaatacttcatcggctactcccttagtttcacctgatgaatctactttgattgaagtaactttatcgccatcaatgtcaacttccattggcattgattcggaaccatgacctttagcttttacttgatattttcctgacttcattgcttacacctctaataagtttaattttatccacaagttaatattagtgcgtcatctgttgatgtatcaaatatcaatttcactatactttcataataaaattgttatgagataactatgtttcgttctccaaataaaaaaagcttaatgcaaatagttatccacattaaactttttaattgcatgatttaattaataaactgaaacttgaaagctaagattaacgctccttccccgcgcctcttggctttttcttatcaaaaataaaaacgcaggatctctctgcgttatactttaagtgtcaacctgaaaagtaaaggagatcctacgcaatgaacagtatagaacaaatcgacacagaaaacgataccaaatccttaatttcttcatttattaatctaattggtctagctaagttgactaaacaagtcaactttaagcgtaaatctaccgtttcattaaccatgattatctcttggctgatgtctgtacattttgctcggctttccttattcagagctaagagtgacaagcgtttttccgttagaactgctcgcaatgtacttaacgatggaagaatcaactggcaaaaactattatgcttgattgcagctcggctcattggctgcttcaaacatccgtaaaaagaaacattatctttattcaagcatagttgaggctcaatatcatggacatatctttttattaaagctcgtttttgtctccaaccgtggaaacaagaacaagtatttagttttagctactactcagacaaagcttagacctaaagaaatcatccaactttatggtcgtagatggcaaattgaaacatattttaagacgtataagcaatatcttgctttagataaatctcaagttcaaagctatgatggacaatgtggctatatcgcagttacagcaataacttatgatctattggcctggcaggaaagacaaaatacagatgataagacaatcggagatttattctatctaatgaacgaatccttacctgatattagattcgtagatgcattggtctacttaatttcagaattaaaagagcttaaacagaatagttttgaaaagatagatgaagtaatcaatgactttattaaccaactgccacgattcatacaaattgcactgaaacagatcatataaaaactaattacgtctagaaaagctcaatagtgacaggacttgagcttgattttggtgctttcaagtttcagtatttaaattaagcttcagaggcgcctgatacagcatctgcttcttgttcatttgaaacagtaaaataattataattggtattatccgcagcagtcgtacctgcaacaaaaccagaagcatagctccaagaattcatcatacttggcattgaatcatgaccattagcaccaccaacaatttctcctgcagcatagaagttacttacgggattcatatcattgtcaagaagctgcatttgatcagtagtttcatatccacccaaagttgtgcagaacagaagtttttgttcaattacataatatgtatcgccttcgaactcatgcataaacttcttgtctctaccaaactcaggatcataatctgctttaacatcttcagtatagttatccacagtttccttcagcgtttgataatcaatacctgctttttctgccacggtcttcaagtcgcctttgaccagaactggactcttctcgccaaccaaatcaaagaatgattgaacctcttccttggtaaagccatacttaagcattaattcatagaaacggtcccaggttctttgatccatgacaatgtaagctaccttacccttttgttcagcaatcgcatccctaaaatgcgtataaggtgcagattcgttaactattctcttaccatcagtattaacaaaaatagcccccatatcggtcgcttctttagttgaataagttgttagcttagcaataccaggttcaacttccaatccatgtggatataccttataccagtctaagttacgagtaaccaaattcatatttttggcaaaatcaagataatcaccagttgaagtcattggaccataatatggaatatcagtcttatgagcctgataatcacgtgcaccccaaccaccagcagctaaaacaagtgacttgaaattgacattaattgtctggtgcttgccttcagcggttaaagataccagtttgccagccttatctttattcaacttttcaacacgggcatctaagataatttgtccgccctttttttcaaatgcctcagccaccttagtcactagttcatatgagctttcactaggcatttcaatttgacgatatacactatgttcaactgtttgggtttccgctttttgataagtcaaatttgcaaattcagtaataaagtctactgccttcccaatattgttagctaatagctttgacaacattggataattagtaccgcggcattcacgagtaatatcttgaactagtctatttggcgaatccttctttgccgtttcaccaaataattctgcagaaactttagagccagttcctacaacatttgagccatttaaaatagttgctccacctaaatagccatttttttcaagtacaactacttttttacccatcgaaagagcacgacttgccgccattaacccggccataccggagccaattacagccacatcaacatttagttgcctttcttcatgtacgacttctggcttttttccgtcaagagcaatgttattttcggctaatgcttttttaccagaatctagcattgcttgagtcatcaatgatgccccagaaacagcgtccacgtcaaaactttgattatcaataatatttttctttaatttaccaaaagtttgattaaaaattgcaggagtttccgaattcttggttactttgacatcactaattttattgttttctaagtcaatctcaaaatcaatttgaccattgcgaccatctgcttgagctttaatagtttgtttggtcataaaaactactcctttacttgttctttttactaaaccgcttatattataaccacaatattaaatctaaaaaataaatttaatttgatattttaatagaatttttttatcaaaagcagtaaataaaagcgagtgatcattctcactcgcttgattctttatctaattttcatccttatttattagcgtaatgttgaataacttctggcttcaataccccaacataaggaaggttacgatacatatttaaaaagtccaaaccataacccactacgaattcattgccaacctttgaaccataatattctaattcaacatcggtagttcttctggcttccttatttagcattgcacaacacttaacgctcttagcgccacgtgccataatgtgttctttcatgaatttcaaagttaaacccgtatcaacgatatcttcgacaattaaaacatcgcgatccttcacgtcagttaccaaatctgatactatcttgaccttaccagttgactcaaagccatcaccataactagaaacatcgagaaaatccagttgatgtgctacgtccatttgtcgagttaagtcagtcaagaagtaaattgcacccttcaaagccccaacaactaccggctttttaccagcatagtcctcagttaattgcttacctaaacggacgcacatctcatgaatgtcatcttctgtgaataatttgtgatctataatttggtcaatattgtcgccttttgccatttaatctacccttcaattcaatttacatatattattcctaataaaaagaattataacatctttaaacaaaaaaagcgtcattttcaacgcttcctctgaataatttctaattttcatcctttgattgatcgtctttttgatctttatccttaatcggttcaacgataaaccagcgcataaagccttgttcgatactgtctaaggtaaacttatatccttcaagttcaattgattcaccctttttcaagttaggataatgttccatcatgtaaccaccaatggtaataatatcgctatcttgaaaggccttcagatctgtatggaagaaacgctcaaagtcatataaagtcgtcttacctgaaacatgaacttgaccatccttgtccttgataatgtaatcatctgaaacatcatcaatttcatccttaacagaaccgaaaagctcttcataaatatccttatcagtaacgatcccactagtaccaccatattcgtcaactactaagacaattggtgtgtgcttagaaatcatcaagtgcaagatatcttgaattggcattgattcaggtaccgtgataatagttctaataattcttgttactggtacgttgccatcaatttggctttgttgcacaatgtcgtacgcataaacataacccacaacgtcatctttatcattatcacgcacaactggaaaacgactgtagccttcttccaagtattttttcaaggcataggcaattgtatcagttgaatcaagtactgacaatcttgttctgtcagtcatgatgtccttagcaaccttatcgtttaattcgaaagctctttccatataagttaagtcttctttatcaagcgaaccaccatgaaccgcattacgcgacaacttgatgatttcagattgtgaataaacttcattttcttcatcagctggagtaaagcccatcaattttaagattccattggagctagtatttaatagccaaacgaatggataaacaatcgtatggaaaatatgaagtggcgtaacgatccccatcatcatcggtactggcttgtcaatcgcaatattcttaggcacaacttcagttaagacaacttccaaataagttaataaaactacgcctaagattgcactaactgacttgatgagtgaatcattcattggcgtcaaatggaaaagatcttccaatatggttgcgaatgtatcagccgagaaccaacccaagactacaccaaccaaagtggtaccaacctgagtagttgacaaatactcattcaagttgtgcgtcatatgcaaagcacgacgcaactttttcttatttccttgacccttagcaagcatatcttcgagctgacttggtctagtttgaactaacgcaaattccgcagcaacaaagaatgatgcaacgataaatattaataatgttgcaactaaattagttactatttgagctggactcaaagtattatcacctttttttacaaatatattactaaaacctattttaccatttcttgcctaaaatagtgcagttttacacaagggataacggttttttgtaatttattcgaccaccttgtaaatttcattaaacggtacacgctttggaataaatttaggatcattaatttcagcattcttgtcgatatagccaactgcaattgccattccgacagcttcatcatctggaatttgggcatattctctaaccaattctgggtatgaaaccattgagtgagctggcatcacacctaagccacggttaatggctaaaagcatgatactttgtgcaaaaattcctaagtcaaaaacggaccaagctggagatttcttcggaaccgttaaaaagataattgctggtgcattgaacattgttttattcgcatcattaaataattgaagcttatttctgaaaaagaaactttgggatgcacccatcgtagccatattacgacttggataagtatcccaatctagtgatagcattgaagcaaaatcttcatgtgcaacttctttatcatcaatctttttagctgaagcagccttaaacttgcttaaagcatcccccatcaaaacatatgcacgccatggctgagaattaagcaatgaaggtgattgctgtgccattttaacgattccagcaattgttttttcttgtaattttctattagtaaacttccgcgttacatgttccttttcataaacatccttaaaattcatttttcctcaattcctttttgcttatataataacaatctatattttattatagtaaaaaactgttaaaaagcttaattattgctcttttcttgctttttcttttctgctgcctgtttttttaaataagcactcattgcaagatcattttttcgcatagcaataaacgcagtaatggttaaagttaatccgccaagacaaatcacaagtaagccaatcggaaacaagaagtctgctcccttaggaataaatgatgccttaattacccagcatgctataccaattaacatcaaaactatacccacaatgactgccttagtgttcggtcgatatcttttcataaatgcccttctttcttaattaacattctaacagaaaaagcttagcttcaacgtagaagctaagccgaaaactagagaaatagtcgttaaatttttacatgagagaggggaaagttgactatttaagttcgatagtttgtactttttgggaatgttcaacactgcctttttcaatcggagtaactgacttaatcaggtccatgttggtgtagacaacgatgcagctgtcatcgtatcccttgtctgtaatcatttggaaatccattgtggctaagggttgacctttcttaactttatcgccttgactaacattcactgtaaacggagcaccttttagttcaacagtatcaagacccaagtgaatcaaaaactcaataccttggtcattcgtgataccaatagcatgtttagttgggaagagtgtggaaatactaccatcaactggtgcatagatatgattatccttaggcttgatagcatagccatcacctaacatcttagttgagaagacatcgtcttttacatcagtaattggcataatgtcgccgtcaactaccgcatctacttcaatacccttattctttttcttaaagaaattaaacataattaataacctctggatttctaaaattcaagtaataatatcaacataaagcttgcgagtaataaaccagctgcagtaagtgaaattgcgattattactcgactaacgccatcttgtgtcttcttcaaagctcttgctcgataaaaacctaagatagctaatactacgcaaagcaagttgccaacaaagagctgagcaatcatctgacttcccatcaagaagcgataagtctgtcgattgattaaaaactgcttgtggtttaacaacatatagtagcctagtatgaagtcaacgatagcaacgattgtactaatcgcaatcatcggctgcttcataatcatcatccgaatcgattgaccagaagcaccgcttcgtagtgcaatcatcgcccaaaacaatagtggagcaatgaaaagtacgtatgaataccaagtcaaaatcttcttagtatccaagtgcatgctttcggttattcgatcgataaagttgccaacttttcgtttactaattgcccacattgatctctacatcctctccttgactctgttgccaagctacatattcactaattaccaaatcaattaagaagtacgctggggtaaaggcaaccttcccgctcttaaagtcggcatcatcagtaaaggcaatcgttggaaaataaatgttgtgctgcactaatgaagctaatttattttgcttcaggttagtgaacgaaacatatttgaatttatcattcactagttccaacttagtgatttcctcattgatcgttttattatcacccgtaaacgagataataaacaaaacatcgcctttttgagcaaagcgtcccgcagcttttaactcctctaatgctgatggcaaaacagttgcatgcttgccaactacaaacaattcatgagccaaatattgtgcgattaactcttgttgccaaccagtagagtaaatgtaaattgtccctgcattatctaaatcgcgatacaagctattgaaatcacgttgtttgaaatacttcaacacgtctgaatttactttactaagttcccgcgcaaaattattttcaattttgattggtttttgcttcgattcggctaattcgaccaaatcaaatttaagctcactgtagccacttagtcctagctttttacataaccggaaaattgcggattcggatacataaagctttttagctaatttggctaagcttaatttgctacagtctctcggattatttagaacatattgaactatctgtttttcagaatcattcaacttatgactattgtcatagaccattgatctcaaatttgccataatacctgtgcccttatcaatatataatttatatattaatgataacacaagcgctttcagattatagcaattgtttcatttgatcaacaacttgatcggcatccaatccgacaacgatgtcaacctcgttgttatctttatgttgtacttcgtaagaatctgcgatcttcttgaattctgaatctggagcgaccttcttaggatcaacgacatgagttcttactctagttgagcaagcaatgacatcttgaatgttggagtcaccaccaagcaagtcaacgataccagtagctctttcaatataaggattatcttgttcagttgataccttagcgtcgccaccttgttgttgcattaaagtgttcatttcatcaagaacttgaggtacgtccaaacctacgataacttggatagccttaccgtggtgtacgacattgacagccttgtttgctttaaatgcggcatctgaagcaactttatttggatcggcaacagatacacgtaatctagtagcacatgaactcaattctgtaatgtttgaaggaccacctaataattcaaggtaagcagttgctctttcaatgtaagggtcattagcgtccttaccagcagcttctgcagccttcttagccttgtattctttctttgaaagaaggtgaacatcttgatcatcggcttcacgacctggagtaatgtaattgaacttctcgatcatgatcttgaagacaaagtaagtaataataccgaagataataccaacgataaattccatcacataggtcttccagtggtttggccaaagtggaatccagttcattgaagcgataccgatcgcaccatctgacatgaatcctcttaaaccaaaggcccacataactgtgttcatcgtggctgacaatactgagtaaactacccaaagaactggagcagcaaacaaataagtaaagtcgataggttcagtaataccagctaatactgaggttaaagcagctgggataagcaaagctgaagtttgcttcttcttgttcttcttagcagttgcgtagaaggcaagacagataaatggtactaagaataccttttcgttaccgtaaagttggaatccttcaactgaagcgatttgtgaaagtggtttagtacttgcagcgtattcagcaaggtgtttcaaccagtatggttgcaaaccgccggcaacaacggctggaccgaattggaatggaatgtataccaagtggtgaagaccagtaggaatcaatacacggttcaagaattggtaaatccaaacaccgataaatccactatctacgatgaagtgttgcatgctggtgatacccatttgaacttttggccagccccagcaggtaatgagtgctaaaggaatcattacgaagaatgctaaagcgtagacataagttgaaccttggaaagtaccaagccagtctggcaacttcttatcaaagtacttattgtgtaaccacactacaataagagcaacaaccaaggcacctaagatactagtgtcaagagtcttgataccagcaatgttagttaaaccatggttagtagcgttagcaacaatttggatcttgtcaaagttaggaataccaaaagctgcaccccagtgggtaagcattgcaccgatgaagtagttgtaagtcaagtaagcaataactgcttccatggctgctctacctctagccttgttggctaaaccgattggcaaacctacagtaaacaaaataccttcttggttgaacactgtccaaccaccagctgaaattgtgtcccaaactgagttccatgtagttcccgggttggcaattaaaccaaacagagtcgggttattgaacaaactacctaaagctacgacaatacccgcaaacgagaacagcataactgggacgaacatagcggccccaaaccgctgtattttctgcatcataatcgtttacctctgaagaaaaaaattaaatcaataacttattcttacatctacacctgcatctacatctttatttcatcagatcaagtcaaccgcaaggtgctcatacaattgacttttgccatttgtgcttcacacaaatatttactcctcaaaaatgttttaagataaaacgtccagttgatatcaaattctgaacttaactctatcttagtagctagcttacatttttatttataccatagttttaagctaatgtaagcgttttttaaaactatgacttattgtttcataaagttaagatgatatttcatttcatgaaatttatttcagcccttcaatgatgtatataccaatatttatacccctttattttgcttgtcgcgcctatgtttaatcatttactttacatacaaaaataacatgtcaataaatatgctatagacattctctatttatacacataaaatcctctgaaatatatttcatttcatgaaacgaaacaagtgataaaacctttttcctttccaagatgaactactttgcttactgaaataacacaaagtctggcataattaacggtaagttaaatgcacaggaggaattattatgacaatcaaatttattgcacttgataccgacggtaccttgcttaattcaacaggtaagattttgcccagtacaaaaaaggcagttaaaacagctttagaccaaggaataaaagttgctttatgttctggtcggccaatcgcaggattaaaacattttatggacgaattaggaattattggacctaatcaatatgctatcactcttaatggcgcaattacccgcacagcagatggcaagataatgactaaagatctagtttctaatcgactttatcgtaaaatgtatgcttttgctaacgagcatcatttaccttttaacgttgtttcccctgattcaaaaataattacaggagatcatgatgttgatttaatggtttatactcaagcttacgaaaatagtgcgactttatacattagagagctagatgaattgcctagtgattttgaaattgctaaaggttgttttgccactaaagctaagttgttagaccaatgggaggataaaattcgccaagaatttgggcaagagctgtatattgttcgtgccgacgattgcttcttagagctacttcaccctaatgttaataaaggaaccggattaaaagaattaactgaaaaacttggcattactccagaagaggtcatggcaattggagacgaaagaaatgatattaccatgtttgactttgctggaacagctgtttgcatgggtaatggctccgaagaagcgaaaaagcatgctgattatgttaccacttcaaatgacgaagatggcatcagcaatgcttttgagaaatttttatgaacaacctaaaacaagtatctgagaagtgattaatctttcctagatacttgttttattatttgttcaaatattcacgcaaagctggcaaaactttctccgcctcaactcgtccgacctcatacactcgtcgcatctcttttttatctgtttctaaagtgccaatttcaagcggaaacggtggacgaataataaaagcttggtcagcagcttcatcttttaccatctgatcaagcaccgcattataatcctcagctttagtagccaatttttttactactgcggggtatttccttaaaattactttttccagtggatagagcttactctgctttttgcgataagacttcggctgtgtagcaatgactacctttttatcacagttttgctgctctaaaaaatcatacggaattgaatcagatacaccgccatcaaagtaataatgcccatgaattgcaactggatgagcaaaaaatggaatcgacgacgaggctctaatccactctaagtcaacataacctgcatcatgtaattgatgataaaccggctcacctgttgcagcatcagttgcaacacaccaaaagtccattggattagtcataaatttttctttatcaaaaacatccaacttatcaggcaaaatatggtaacaaaagttagccgcatacaaattgcctgaccgccgccatgatttccaactagcataatatggtttccccgcaaagcgcatgttgtagcgcaatactcttcccttttgctccgacttcaagtttacgccaaaggcagcaccggctgaaacgccaattgctaaatcaaaggttatgtcattttctaaaaacacatcaattacgccagctgtaaacagcccacgcattgctccaccttcaagtactaacccacttttcatattttccctctttatcaaaaaagacctacgcttttcgcataggtctaatttattcttattttaattttacttcaagcccgaccattgccattcggttacttctggcatgtctttaccattgtcgcggatgtattggtggtgcttttcaagcaagtaatccatgtgactgatgaagtccgcattcttgcccttcaaagctgggatgctttctacggcatccttagctaggtcaaagcgatcaagatgattcaatacccgcatgtcaaatggggtagtaatatcaccattttcttcatagcagtgaatatgaacattgtaacgcttgcgagcaaaccaaatggattccatcatgctcttgtagccatgccatgcaaagattactggtacatccttagggaataatctgtcaaattcttcagttgacaagccattcttgttgtcctttggatccattaacttcataacatcaactacgttaatgtagcgaatcttgagatctgggaacttcttatgcaaaatatcaattgcggccaaagtttcaatagttggctcagtttcagttgaagcaaagacaacatccggcttagcacccttatcagttgaagcccagtcaatgtaactcaatcctttatcagctaatttagtagcttcttcaattgagaaccattgtggacgaggctgcttagaagttaccaaaacattgatgcattctctatctttcaaggccttatcgccaactgccaaaagcgtattagtgtctgatggcaagtattcatgaacaagatctggacggttcttttcatacaagtgagtcaagatgcctggatcttggtgagtgtaaccattgtggtcttgttggaatacagttgaagttgcgacaaagttaagtgatggataatcatgacgccagtattgttccttagcctttctgagccacttcatatgttgagtaagcatagagtcaactacccggccaaaggcttcataagtagcgaagaagccatgacggccagtcaaaacgtagccttcgagaaagccttcatcttggtgctctgacaattgtgaatcaattactcgaccgctaggagccaggttttcatcatttggttcatgaatctctggttcccattgccgcttttgatcgtcaagcaattggaacagacggtttgacttggattcatctgggccaaagccgcggaaagtagttgggttgagcttagcaacttcatccaagtacttagcccattcaaccatgtcttgtgcctccatagaacctggcttgtcaaacttcaaagcaaatttgcggtagtctggcaagttaagccgcttaggatcaagaccaccgttagtgattgggttcatggccattctatgttcacccttagcagtgttttcagttacgatttccttaggtgaaccgtcttcattaaacaattcttccggcttgtagctttccagccaatcagtaagcatatcagcgtgttccatatcgccttgagcaactggaattggaatttggtgagcacggaagctgttctcaattgggttgccatccaagtccttctttggaccagtccagcccttagggcattggaagataatcattggccagtgtggcaaagtagcgtcattgttttcacgggcgtgcttttgaatagccttgatttcttcaatgacttcatccatggtcttagccatttcttcgtgaacctgcattgggtccttttcaccgtcaaaacgaccacccttaaagactgaaacaaagtgaggatcccagcccatgccacggaagtattcggttaattcttgatcgctcatgcgagaaacaatggttgggttagaaatcttaaagccgttgatttgcaagattggcagaactgcaccatctttaattgggttaatgaacttgtcactaaaccatgaagcagctaagggaccagtttcagcttcaccatcaccaatttcaacagcggcaataacatctggattatccaaaacagcaccagtaccgtgtgacagtgagtagcctaattccccaccttcatgaattgaacctggagtttcaggagcagcgtgagaagcaacaccgcctgggaaactgaagcgtttgaatagcttagccatccccttttggtcctgggtaatctctgggtaacgttcagtatatgaaccatcaagatatgagttagaaaccattacctgaccaccgtgacctgaaccctcaatatagaacatgttcaagtcatacttcttaagcacacgattcaagtgagcataaataaagttctgtggtgcaatagtgccccagtgaccaattggcttaggcttaacgtcttctgcaaccaatggggtcttaagaagagggttcttcatcaagaacaactgaccaactgacaagtagttggctgcgcgccaataagcatcaacgctctttaaatagtcttttgagtcataatcaactgccatcttattctcctttgagcatctaagagtgctctttttcatttgttcttttgtttacacttatatcataccaaattatctaaaaagttcaactatttttataattggatcctaccaattaaaaaataagtatttaatttaaaattgcatcccttttttgttgctatatcaaccttttaatgctttgatataagtatttagttgcttaaatactgataagtacagataaacaaatatcaaatactgacataatcagtgcaaaattattcattcatgttagattactaaatggagggcatgagatgacccaagaagaaagattaatacaaattaaacagttacttaaaaaaaagcaccaattatcaactagacagattgcagctcacttcaatgtatcatttgatacggcaagacgagatgtaattcatctaactgaaactggtcaagcaattagagttcatggtggtttgatggaaattaattgcaacagcgtacctgattttttagcaagaaatcaagtacaatcaccggttaagatgaaaatggctagaatggcaaagagatttgttcatccaggtcaatgtgatttcatcggttcatcaactacgttaaagcagctctgtccaatgcttaatggtattgacatgcagatcgtcacgaattcaatcgacaacgcattaagcttattagcaatagaaatcccatcagtcagattgttgggcggcgttatcaacaaaaagcagcgtttcatttattctgaaacagcattagaaacattgcgtcaaatccatttcaatactgcatttattggtggatctcgaatcagagatgacggcgcatatacaccaagcatggctgattccaaaattgtcgaaaccgccgctagtcgcgctaatcaagttgtattagttgccgaaaaatataaatttactaatcaatcctcttcgccatacatgtctgtccccctcaatcagatcgatgtccttattaccgacaccccattgcctgaggaattaaagcatcattttaatccaaaaacgcaaattatacctgttttaaaggagtgatagttatgttcagtctctttaaccaaaagaaacaaagcgaaagtcgtgaagtataccaagatttgaagaatttttataatagtttttttagcaatatctacaatgaaatgaatattggtcgctatcggcagattcgcgatgcaattgggcttgttcttaataagttcgacagtggtgatcatcctcttgaatacactagcaaattggtcatgtatattcaggctcgaattgccatgaatcacctgcatctaactcatgaacagcaagacctaatgaaaaagctaagtgacgctaccaaatatgtaaatctttcttatgtttatctgagtccgctcacttcggtagaacaatttgttaatatttaagtgtatctagaacctgctctagatgaaaaaatgaatccaaaaagaccgagtagctgatctgctcggcctttttatgcaataatattgttaaaagatatagattttttcaaaggaaataattatgacaaaattaccattcaaagttgttgctgtcgatatggatggcactttcatgcatgatgatcaaactttcgatcacaagcgctttgaccgcatcttaacagaattacacaaaaaggggattcactttatcgtttcaagtgggcgcccttataccagattacgcaaagattttgctggctttttaaaccgaatcgacatgattgctgacaatggctcgcttttgcttcaagataatcaaattattagcactcatttgctcacttataaaacaaccttagatctaataagttttatcaaagagcattattccaagagttcaattattgtcactgggatcaacaattcatatacaactattaatgcttctcctagttttaagcagacgatgaacttctattaccccgatcgaattgaagttactgatttagcagcggctatcaatccgcaggatatgattactaaaatcaccttaagttatcaatatgatttttccgcggaattagaaaaagaattcaaccaaacccatgccgagaagattcactgtacttctagtggtttcggtttgcttgatattgtgccttacagcgttaataaagggagcgctctaaaatacttcttacgctattttggtgctaaacccaatgaattaattgcctttggcgacggaatgaatgatgctgagatgttaaaactagccggttacagttatgcgatggctaatgcagaagatcaagttaagaaaatcgccaagtatgaggccccgagtaacaatgatgatggggttttagaggtgcttgattcatatttagctaaagtagagaaataataattactgtaaactaaaaccgtctgaatgagcaaaataaaaaagtagccaagttttcttaaactaattgacttaagaaaacacagctactttttatttacccaaattaacaaaggtattaaagttcatataatgataatgcacgcgcatatttgatacttcaaacggcgtcccatcatccaagaagaagatcccttccattacaccaacaggttcagtcggcttcaaatttagcttctgctgatcttcttcattcgatggttcaacagtgatattcaagaatgacttagtaacggtctttccctgttcatcttccaaatagttaaacaaagacttttgtaaagtctctggctttaattccggcacaattttaatcggcaaatatccagtctcaattaaaaatggttgttcatctaacagtcgcagacgcttgaattcataaacaaaatcattttcatttaaaaataagtcttccgcaatttctttagttgccttaatcacatgaaaatcaagcaacttaatttgttgttttttaccagggactttaaaagaatcagtgattccaagattcgatccatcataacgaaacattgcctgtttgcgcaaatatagtggattaataaaagttccactacctcgctttttaaaaacgatcccttgttgagccaacagctccagcgcacgcttcattgatgatcgacttacctgatagtgttcggctagactgcgttcatcaggcagtcgcatccccttatactgattattcaaaatattctgtttaatgtcatgcataactgtccgataaacataatctgccattattctcgtccttgatctgcctttttaatactatcaataaaccaagttgcaaacttatccaagtccacatctgtcgcaatctccgcattggcatgttcttggtccataaaatccattacgctggcaccataagtatattgcccgcgcaattcaatattcacatttgcctttttcattgtaaacatttccggatgaagcataattccaactgcagtcggatcataaatcttaattcgcggatcaccgtctggttcatgaatgttagagaaaagtgaatacaacatattacccacttcaccacatgtcttaactttatccatttgctctggtgttaaatgggccttatttccaatttcaagtggagcaaccttaactagcaatccactatgaaaaactacctgcgctgcttccggatctcccgcaatattatattccgcaaatgggctatgatttccgtgaccaatattaccacccataattacaatttccgcaatattttctttaacttcaggatattgcttaaaaagtaaggcaaagtcagttaatggtccaatgcccatcagagttattttttctggactacttttaatttccttagccatcaacgttgcagcaagaccaggttcaattaaagaatcatcagcttgttcaaattcaaagccggcaatccctgttttaccatgaaccgaagcagcactaatcattggtgccaccagtggttgattagcacccactacgacaggaaccttagtatgcaaaaacttttctaaatttaaggtattttgcaaggtatatttcagtgccacgttaccccaagtaggcacaatcatgcgcacatcaagttcttgtgcaaaaagactaatcgtcatggcagcaatgtcatcaatgccaggatcagtactgataattaaaggtttcttgttcataaaattatcctctcgtattaagtacttttataatagcaaaaaaccaaccaattaagaaagtggttggttttattctaataattatttttcttttttgggtttaatacgttgaatgtgttcttcttcatggtcacctaatactaatggcacacgctcaaccacagtatcggcatactccagtccgaaccaagatgcagggttagaagataaattctgcagccatactcttgcttcaaccatgaacttttcatagcctgtcaatttagttaatggactaattacgtcgttaacaattacaaaggcgaagtcccctacatcacgacccggtgtagtagtgaattgttgtggttgagcttcaatcgttccatcagcgatcaaatcatgaacaatttgccgcaaataaacatttacactggtttgttttctaaaacctaaatacaactgaacgttaattacattcttagtaccataagtattgaccgcgtattctgcagtatatggctcgttagtaacattaacagttacaaaccagtaagccttagcccgtttaggtctcttatccaaaattgaataaagcatttcgcgcttaatgaatttattatacttaaccttagccatataaactacattcgtagcgtaaactggataatcatcacagtggctcaactcagtcaacatatctgtatattcatctaagcgaacataagcattctgctcctcacgcttatcacggatcttattgccatagaaccacacgtacatgattgccaaaataaaaccagcaattaaaacagtgacgtaaccgccatgcaaaaacttagttaagcttgagaataagaacatcccttcaataaaggcaaagactactaagaaaatgcatcgtattgatagcgcggtaccttttttacccagatattcaaataataagatagttgtcatcaacatggtaaccgtgatggccagaccatatgctgcttccatatgatgtgaagttctaaataagaaaacaattgcaactgtaatgacacagatcatcttattaattgaaggaatataaatctgtcccttctcatttgaaggatagataatattcattcttggtaaaaattttaaactacttgcttcagctactaaagtgaatgaacccgtaatcaaagcctgagaagcaataatagcggcaatcgtagccaaagcaatagcaaacaatcttagactacttggtactgcttcaaaaaatggattgaaatcaccattaccagcatgataattagcattttgtaaaatccagacgccttgccctaaatagtttaaaatcaagcaaacaaacacataaggccaagagcccataatattacttttcccgacatgtccgacatctgaataaagagcctcagcaccagtagttgccaagaaaattgaacctaaaatcaaaatacccactttattagcaggactaaataaaatacgcaaagcatgaattggattaattgcatcaagcaaactccaatcatggcttaagttcataaatccaatgagccctaaaaaagtaaaccacaggagcatgattggaccaaaggccttaccaatcacactcgttcccattctttgaattgaaaatagtaaaaccaggataacaatagtaatcaagataaccatatcttgcgacgaaactggaattacatcaccaaagcgcatatttttcaatccttcaattgaagttgtaacagtcacagctggagttaatgtcccatcagctaacaatgctgctccaccaattaaagctgggataactagccatttagccctctttctaaccaatgcataaagagagaagatccctccttcaccatgattagtcgccttcaaggcaattatcacatatttgaccgttgtcaataatgtaacagtccaaaaaatcaacgaaatggagccaacaattagttcacggttaacattactaatcccaccattttcagtcacaatcgacttcataacatacaaaggactagtaccaatatcaccatagacaataccgatagcaattaaaaggccagtaaaagacaccttttgcttaccagatattttattcataagtttttatcctctatttcacttaaaaattgaaatttttactagtatagaaaaagtctagattttttgcaataaaaatatatctttttgaaaaataaaaaagaagatgaaatctccttcagtcacttaatttactttttcttatcttcgatggtgccatcactatgagcaataattacttcgtcacacatatccaggaacaagccatgttcaactacgccaacagtatgatcaaggtaatcagctaaaccatgaggtgctggaacaggatctgcagccaaatcaataatataatttccatagtgagtcacataacgttgattgccatccatacgccaccgaggctttaatccttcttgttcaaaacgtttaaagttttgttcacaagaaattggtaaaacttcaactggtaatgggaagccgcttaaacgatgcactaattttgattcatcaacgatccaaatgatcttcttagaattgattgctacatttttttctaaagttaatgcaccaccgccgcctttgattccatccaagttatcggtaacccgatcagcaccatctacagttaaatcagcttgatcaatatcggccaattcactaactttaaagcctaagccctcaagttgttttttactacggttactagtagttacgatagccttcagttttaagccgtcttcatctttgcgcttacctaaagcatcaatgaaaaaggcaacggttgaacctgtaccaacgcccaataccatacctgatttaaccatggcagctgctttttctgctgcttcttttttcaaacgatcttgttcttgcttgttcattattcatcatcctccatcgcctgtttaacttcctgttcagttggaattgaaggctgagcacctaaacgttgtacggcaattgaagatgcacgacttgcaattttagctgcttcttcaaagttagataggccagaatttaaattgcttaccaaatatccaataaaggtatctcctgcaccagtagtatcggctgcttcaactttataagtcggtattaattcttcaacatcgggagttgaaatatacgcacccttatcaccataggtaataaccacgttttttacaccaagcatgtgtagtttttctgcattagtggccagcgttgaattatctttaattgcaatgccagtgatcttggcactttcagtttcattcggtgtaatgatatcagtatattgcagtaattctttaggaatctcatcaactgcaggagctggatttaaaatagtgatttttttggcctttttagcaatcttaaatgcttcaagcgtcacatctagtgggatttcgaattgagcaattacacaatcccaactcttaatcaaatcaccagctgcacggatatcttccactgtcagttcataatttgcgccgtgatcaataatgatgtcattttgcccagcttcattcaacgtgatataagcatggcctgtctttgctcccattgtggtttgcacataagttgtgtccacgccataactcttgagctgatgcgtgataaaatttccttcactatcttcacctacacggttaataaagtaagtttcagctccacttttagcagctgcaattgcctgattagcacccttaccgccaccagcagtagtaatgtctagcgcattaattgtttcaccaggcttaggaaagtcttttacatgtaatgttgtatcaacattacttgaaccaataactacaatcttcttcattatgagcatcctcttctaaaaatggatttattcaacctcaattataacaaaaaacgtattcaaaatattgaacacacatttttgaaatcttactgtaaaataccaccattaacgaagccttttaagcgctcagcttcccacttcaatgtatctgaatcgtcaacttgcgagatcttatacccaacgaaatatggtgaagcatagaatcgtggaataatcttgcaacaagtaccttgaccatcattaattggatagaaaaataagttataagaatcaacaccatgtgacaagactgaacgcacatattgtgtgcccttttgaatcaaatcggcccaagtatccaaattagtattatcatgtgtcaaaatatttacttcttggtagccttgaactggacgcgctgataagttcatttcaactgaacccgaacgcccgacttcaaatcctttaaagttatcagcgccaatatcgtgatagccatctttatgatataagcccacgatctgcatatgtggatgagttaaagaaccatcagacttgggaccaaaatttttataccaaagcacactctgataacggcctgaattattcattttttgaaaacacttcaagccaaacttcatcaactcttgattatcttcacgcgtataagttgaaatatctccctggtgatcacttgattcaattaaaattgtttgattagtatcctttaacgtagggtacttattcttcaaccaaatcttatcgccatctttttcataaatattaattagatgctgcacatcacaaaaaggacagccagcattctgatttccttgccgattaccataatcataatcatatggcttacgcttaccaattgaatattcatacactaaaggattcttgtccatatttttcacctgctaaaccaaagatatcatacatttaacatcattttaacaattttatcggttaattgtgaacatttttattaataaagctaggaatagtacgtctatctatgataaactacctttgtaaaagaaatacatgatatacatgagaggaagaatcatgaaattctataaaaaattggtacttactggtgccgcagctttagctgttctaggcttgagtgcatgttcaaataataattctagttcatcttcatctaataagaagattccaactaagattaacaagaagactaccgttaccttttggtattcactaactggtaatgcgcaaagcagtttgcaaaaattgactaaagattttgaaaagaaaaatcctaacattactatcaagttgcaaagccaaggcggcaactactctgatttacaatctaagttggtttcaggtttgcaatcgccaaaggatttaccgacaattactcaagcttatcctggctggctttacaatgctgccaagaacaatatgcttgttaacctaaccccatacattaacaattctgaaattggctggggctcatatgctaagagtggcattaagaaagctctttgggatggtgcaaacatcaacggtacacaatatggtgttcctttcaacaagtcagttgaagtacttttctacaataagaccttacttgataagtatgatgttaaagtcccaactaacatgagtgaattggcttctgcatccgcaaaaatttaccgtgaaagtcaccacaaagtacgcggtgttggatttgatgctttaaacaattactacatgatgcaaatgaaggaaacttacggcaaagacttcaataagaacttaaactttgctgccaaggattccgttaaagccatcaactactacgctaatggagtaagagccggctacttcatgcaagctggtactgaaaagtacatgtcaactccattcaacaatggtcgcgttgctatgttcatcggttcaactgccaatgaagcttaccttaagcaaggacttaagaagggttacacttatggtgtagctgctcgtccaagcacgatgaacgtacaacaaggtactgacatttatatgttcaaaaaagcaaccgcaatgcaaaagtcagctgcgtttaagtaccttaagttcttaacttctaagtcatcacaactttactgggctaaacaaacaggctacatgccagttaatactgctgctatcaacgacaaggtttaccaatctgccaagaacagcaagataccagcaattattgccaagacctctaagaacctttacttcttaccagtaactaagaatgctactgccgcatatgatcaagttaatgctaacatgcaaaccattttagctaaggcaagtaaaaagcaatcatggaatagcgatatcaagactggtaaagataagcttgatgctgcttggaagcaataatttttcaaataaaatatctatcaaaaaaagaagttcagtattaattgaacttctttttttacctaattatttactaaaaatggatattgaatttgatcattatcagttacattcaacttgtaacgagcacgatataaagccttttctaccgctaattgccctgcagttgtggccattgcaatcgaatatgacttgtgtggtgaattgatcaggatttgactgatagaatgcttaatgtatgactggattagaatgacataattcgattccttacatgcacgtaaaacattagaagcctgtttcatctcgataattcgagctactccattgtgtgcttcaatcaccttagccaagttagaggttaagctcttgtctcctactacaacggtaactcgttttttatcgaggtcaaaatcaattcgggaagcatagtcttcattttgcttttcagacgactgcttctcctttttttctaattgatgcaataaagacttgtgtctacctttagtcttgtgcttttccgtttctttatttttatccggcttttccttcttttctggaatagtaacttcagcttcggcataacgccatctaaccctaatgaaggatggatcactgactcgccaaacaatactaatcaggtcattttcgtgtaagttaaagtgacttacagtattcatgtctaagtataaaatagctttttcaggatttacttgacttaggtttttgccattagagtcctgcttgatgtataaaccaaaagaatcacggtgaactaccgctggaccaaattcgataatttcctcatctggcgcaaaagactttgcatgatgctcaactttaataattggacgattgccactgtcatttaagtgatctagcaaagtaactgtatcaccgttttccagcttttcaattctagtcaagtgttcattaaaatattgtactgaatgaccattctcatccactgcttctgcacctagcagcttacgcctaatctcatattgtttttcctttggtttagccacaggaattattttcttaaccacaggcttaggaataggagttatggtcgcatatttgtttttattctttaaaaccgtaggactcagagctttagcagcttcttcttttttagctttttctttttcaagctcttccttcgtttttttcggctttattttttctacagtattttcatcattttcttttttagtttctatttcagttttattttctagcttattctcagtttttatttctggctcattttttacagcctgatcagctttttccgcaattttaacgacttcattcttattctcaggtggattgcctagtactgcctggttatatattttactaataattttcaacgcaatcattgactgcttcagtgattggggatcgctccccgtcgcctgcattaaatcaataatatcttttctataatcaatcgtcatatatttaccttcttatttcttaaatatgaatattatacaaaaatttttaatgctaatctaattctttatagatttttatattatttttcctgtaaaaccattataataaaagtagttaaaatatcatttattaaatgagggagactactatgaaaaagaaacttttacttttcgtatcctttttagccggtttattgttcttggtatctacaccaacttatgctagcaagcttcctaaaggctatggtattgctaaaacctttaccacaccaaaagcaacccgtggcacctggtattatcgcgaaaagggtgataaaacaatttctaaggtaaagatcactgctcatagcgtagatggtaaaaagctttacgtaccttcacaaaagttcttcgagaaaaatgtttacaacgtttcagctaagaagcgtaatcagttcatcaaaaaaactgaaaatatttatgctgcagctaactataaaaagggcttcaatgtcaacaattgggttaacttagctggtgatggtgaatactacatccctgttactagaactgttaacggcaaaaaggttaaggcattaagaatagctactggtgctggtccttatactgctgcatatgcatacaaaactaaggcattggttaaataatcattgtctaacgaaaaagcaaattagcataatttgcttttttcttttaccgatttttacttttccgtatttctccttcaaaaagagcggtcaattttgccaaactcttatgatcaggatagcgttgaactaattgctcaattttatcggtagctaatttttttacttcttcggctgagcccattttctctaaaaaatctgccaaatcacctgaacgagcaagtaacttacgctcactacgactttctgccagaaaagcttgatcaaccttacgtaacttcaaactaccatctgcattaaagtgatatcctccccacatatgctgcttaattggttgcatcggttcgctatccacataacacaattttcctaccatatggtgcgtctcagtaattcctaacgtaaccgggtcataaatatcgacatagttaaaaattttctcccgcattttagccacctgacgtcgttctgttggcgttaataaaagccaaatattggttccttcatacagataagcagctgcaattgcttctggatgacgacaattagctaaagcaaactgagcattaattgaacctaacgaatgaccataaatataaattctactacctttaaattgattaattgtctgattcaataagtgagcagctgactttaattggctaggaatcgtccgttttcgtgcaagcagtgcttttaaaattggtagattagttttaatccattcatcacgccaagtttgtggagtcccctttttaaaaccatatgatcctttaaataagattgttatttcattcggacttgaaatgacgaaggctcgcatcccatccttagcataaacattacgacaaacagttccaagataatgttgatctattttgatagtatcacccagctgcaattcatcatatgtctttttagttaattcaactcgttcacgatctgttaactgtgcatttacactcataatttttcctaaaataaaaaactaactcttactattatgttagcatgagttagtttttttggataatttgagcctttaatcatattttttctgcaagtaatttgcaatcgttgacaagcagaaacagacaataaagtacatgattgcaataatcacatacattggaattaagtaagtcgtgttctgactgtaaataatttgtgcgtggtataaaagctctggcaaaacaatgatagttgccaatgaagtatccttaaccaatgatacaaattgtgataataatgccggaatcatattgtgcaaagcttgtggcataattacatgatacatagcctgaccatacgacatcccgttggaacgggcaccttccatttgacccgaatcaactgagccaattcctgaacgaacaatttctgctagcattgcaccttcaaagatgactaacgctgcaattgaagctgtcgttggattcgttacaatacctaattgaggtaaaccaaaataggtaaagaagatgatcaacaatagcggcaagtttcgaataatatcaataataaagcctacaattgcagacacatacttaattttcatgtagcgaactaatcctaagattaatcctactacgaagcttaatgcaattgaaattaatgaaacataaatcgttacccaaagtccttgtaataagaagcgaatatcgacccatgaatatgcatgaataaaagtttccattctctatccccttcctattagctgactaattttttctctaaatgacgcatgtagtaactaagcggcaaagtcaagatcaagtagaacaatccaacaataatataagtatcaattgtttggaacgttgagaacgcaatcaattgtgcttgatacatcaagtcaaaaccggcaacaaaggccaaaactgaagagtttttaaccaagttgacaaactggttgcctagtggtggaatcactatcttcatcgcttgaggtaagatgacataacgcatggcttgcacataggtcataccgttggagcgagcaccttccatttgaccagttccaattgaattaattcccgcacgaacagtctctgcaataaacgctgatgtataaagcgttaaaccaattgtccccgcttgaaatcctgacaatttcacaatataacgtggaacgatcaaataaaagatcatgacaattaccagcaaaggtatatttctaaaaatcgcaatatagatcttcgcgatcacttggccaaatttagatggtgctacctcaagcaaggcaaaaatcacgcctaaaatcaaactgaaaactagagcaataatactacttaaaatagtattccaaaaacctgttaggaagctgccccagttgttagtaataatttgccacattatttcaaaaccccctttagactaaaaccaggaattccagcaaaccactttttaatcaaacggtcataagtaccattcttttgtaattcattcaaagcttggtcgatatgatcagccatttgtttttgtcccttattaacagcaattccgtaaggagcattactatagacgccgccgactaacttataaccaggattttcttgagcgataccggcaagcaagccgttgtcagtagttaatgccacaccttggttagccttcaatgcagacattgcttgaccatagtcatcatattgcaaaatccgcgctttaggggcatacttatgtacatcatcaactgcggtagttcctttaacggccaaaacagttttgccttccagatccttaacattcttgatcttactattattaggcactaacaaagatgaaccggctggaaagtatggcttagagaaggttacttgcttggcacgttctggtgtaatagtcattgtggctaaaacagcatcaacatttccattttttaaaagtgggattctagtgttggcagtagtagtaacaaaatcggttttagcatctttacctagcatttgcttagttaaagccttagccaaatcgatttcaaacccttcaatatgtcctgtcttaatgttcgttaagccaaacaatctagtatctgctctaacgccccaaacaattgtcttactttcttttactttttgataaacattattgctagcatgcttgccacaagcagtcaaggcaagtgccaagattagcaataagggaaagaaaaaaaatctttttaattttttcatggcgtgccaccttaatctttagaaatgatcttgcttaagaattgacgtgcacgttcagtatctggatgagcaaagaattcttctggcttgcgatcttctaaaatatgacctttatcaaagaaaattaagcgattgcttacttctctagcaaaacccatttcgtgggtaaccacaaccatagtaatgccttgttcagcaacatatctcataacttctaaaacatcttcaatcatttctgggtcaagggcactagttggttcatcaaataaaatcaccttagggtgcattgctaatgatctagcaatcgctactctttgtttttgtccaccagataattgatgaggataagagtcaattttatcggccatacctactttttcaagatattgcatcgctactttacggttctcatcatcaggacgctttagcacaatcttaggcgccagcataacgttctctaacacagtgtgattattgtagagattaaagtgttggaataccatcccaacatttttacgaatcttattaatatcggtctttttatcagccaaatcatacccagttacaattaattgaccgctattaattggttccaagccattcatagttctaattaaagtactcttacctgaaccagatggaccaataattgaaaccacttggccttcatcaatctttaagttaatatctttcaatgcatggagctttccatagtacttatcaacatgcttaaattcaataattgctgtcatggcttctacctttctttcctttgtctacacaatataattattttactcttcttaaagctaaaactaaatattttagcaattcaaaatagtataatagcctgctaatcttataaatttgttcggttttagcaaaatatatttgtatttagctagattaaaataatcatattaacgctacttacgaatttattaactactaactttcaggataaagaaaaagcccatcatcccctctagtttgggacgaaaggcttttttccgcggtaccacccacattgtctaagtatagaccaactcatgaagcaccgacatgcttcaccggcgtggtaacgtaccggagacgtctcgacctactataagaattgttagttcggtgagctgctaaaagtgtttttcaatagttcagggtctgctggcttttcactaacaccaactcactgctaagaataaactacctactcgtctttttcatagccttttaatttatttatatgtatttaacattatttttcaagaaaatgcaagggaaaataatttaaatcgcaaatgtatccgtttttaattaaaataaatgctgttaatattcggaaaatagcttagaatattagtgatacctagaaaattaaaggagtttgatatgggaaagcttgaaaaacccgttattattggaattgctggtggttctggtagtgtgaaaacaacaatcgcacacgaaattgccgataacatcgatgatcaagatcgaattatgatcatgacgcaggattcttactacaaagacaatactggcgtatcaatggaagaaagaatgaagatcaactacgatcatcctgatgctttcgatatgccactacttgaggcacaattaaatcaattgatgcacagaaagccaattgaaatgccaacttatgacttcactgctcatcccgtagtgatgaaactattcacgtcgaaccagctgatatcattattctagaaggaattttggtactctttaacgaagatatccgcaatttaatggacatcaaggtttacgttgatactgatgatgatatccgttttattcgtcgacttgaacgtgatatgaaagaacgcggccgctcacttgattcagttattaatcaatacttgggcacggttaagccaatgtacaatcaatttattgaaccaaccaagcgttacgccgacatcatcgttcctgaaggcggcgaaaacgatgtggctatcgatatgttaactactaagttgcaatcagttttaagtgaataattatcgagatataacaaacaggcaagctaggaataatacctaacttgcctattttaatactctaaattatcttagtttttcttatcatcctgtgcattagctgcatccaaaatacggttatatttcttagcaaagaataccaaaagcaaaacactggcaataacataaataaccgctgcaatgtagtaagcattagcataaccatcttgcgtattaaacaagtaaaattcagtgaagagaccatcaataactccaacgatagcataggcaatttgaactacaccagtaaaggctggacgcaagtccttgtcaacaataaccatctgaacttcttgctgaatcggcatcgtggcattggctaaacctgttctcaagaaaagcagaattgcgacaatgacgaataagaaggctccgctacctaaccggcgaccattagctaacaaaagcataaccggtacacaagttaatgtacctgcagcaaccgacacgattgcaccgagtttcttttccaaaaatggagcaaagaagtaaccaattagcattgctgcttgaacaaaagtgttgatggtagaagtaacatcacgtggaatgtgcaaataactattcaaataaattggcacataaacggcaactaaacgagcaccaagttggataccggcaatataaacaatccacatcaatgtcttcttgctcaaaagcttcttatacatggccaccttttcaactctgctaggttctttatcatctgcagtagaacgatagtcacgtggtacatcgtgaataaatagggctaagataaaggctaacatcgttacagcagctgtaatataaagtaaaattctgtatgaatttgtatagtcagctaaagtttggccggttaacatttcagaattacctgatagaactgaagcttcgtgataaggaatccctctaattaagccaaagaaccaaacaacagccttcccacctaagaaagtacaaattgtctgcgtaatcaagttaacaatcataacggttgagaacatcttagttctaatcttccctggaacatatgaagtccacatcagtggatacatcaaatcataaaccccaattgctgtccaagaaatagtataagcgatcatgatgataatttgattggttgtgatacaggttaaggccataaaaattgccgtcattggtggcaagatcagcaaaatctttcgatagccccatttatgaaccgtcgcaatcatgactgacatcaaaattgctgtcgccgcattaaaaatgtttaaacctgaaatcaagtgtggcgctacaatcttgtagtaagacaaggctgcatcattcgtaatccctgttactgcacctaaaataccataaatccataagtagacaatgacattgtgtttataacgtggattccaatttttaatcgcctcatcctcagcttccttttccgcattgcttcgtcgagccatataagtccccttccccttttatgaaaacgtatacaaatatctaatttaatcttagcacctatatagtattaataaagtgtgtgtatacgaaaaggtattgattatatgacttaggcaagccttggctttaatgctttatcaaatagattagtaatcaattttactagtacaccatcaaatactaatgatgaaatcatgctgacaataaacatcaaaatttggacattaatttgatagtgactccaaccaaataagaagtagctgggaataaagccacccaaattagcaaaaaaggcaccggtcaagacacttttccaagagaatctttcataacgttcctttttagggaaaaagccaatttcattcattgccccctgaattaatccttcaaaaattgtcaaagctccccattgtccgccgatcgccatttctacagtcgcagccaataattcaccgattgttcctgcacccttagtcggtacaaaatacattgctagtggtgccgccatgtaccataatcctgtaaaaatattatccactactggtgcataacccgtgggcaaaaaactcaatttcaccaagttatacacattattaaaaccataagtgtaaatcacgcccatgattattccaattaaagccactaaaataattgactttacattccattttgacgatctagtaaacataaaaatgctccttactaacatactgtcagtaggagcacacaaataaaagttaattctcttgttagcactttcccttgcgcaagtattatcttgttcaggttcgaagggtattatctcagcattacgcacccctagtgacatttcatttatttatcaattaagtcaagtatagcacattgttaatcaaatgccatttgatctgtgtaaagtttgtaataaaatcccttttctttaagcagtgcctcgtggctgccttcttcgatcacattaccatcttttaacacaacaatcttattagaattcaagatcgtctttaaccggtgagcaatcacaaagcttgttcgtccagcaatcacagtatccattgccttttgaatcttttcttctgttaccgtatctacgttagaagttgcttcatccaagattaggaatggtggattcgttaaaattgtccgagcaattgacattaattgcttttgtccagttgaaaagattgagctagcatcgctaacttgagtatcgtaaccatcaggcaaagtctcaataaaatcatggatattagcctgcttagccgctgagatcacttcatccattgaagcattcggcttaccataacgaatattgtccgctacagtaccagtaaataagacagagtcctgcaggacgatcccaacattatttcgcaatgatgttagttgaatatcacgtacatctgtcccatcaaaggttactttacctgaattaacatcatagaagcgatttaacaggttcataatcgtagttttacctgaaccggttggtccgaccagagccactgattggcccttatcaaccgaaatatttactccgtgcaaaatttctttatctttattgtagccaaaatgaacattttctagcttgacaccatgattcaaaccactaatgaccttaccatttggcacttcgttttcatctttttgttcttcaactgtagctaatcttcttgccccagttaaagctaattgaatcatggaataaattgaagtaatttgcgtcaaaggttggaaataaacttgtgaatattcaacgaaagttacaatcaagcccaatccaatagcctgagaaatttgaccggaaataatcatccaagaccccatagcgatgacaattgccaaattaagtaagttcaatccgttcatcaatgggaataggattcccgaataaaattgccccttaaacaaagcgattcttactttattgttgtagaccttgaagccatcaaccgattcttgacgcaaaccattggtaataatcaccttttcaccattgatctgttcggtaatataaccatttaaatcgccaatttcatcttgctgcttatcgatataaacgcgagcttttttcattaaaaggacactaataatcaaaatgaatggtgttgtcgcaatcgtagtccaagccaaagtactattaatcgtgaacatcacaataattgttcccacgaacataattccctgggaaataatttcaaaaatcgcattgttcattgcgttgaaaatattatcccaatcggaagtaagtagcgataaaagtttaccatcctgatgagtatcaaagtagcgcactaacatccgttgaaacttggcaaatagattctcacgcatgtcattagttgaatccgcattgaacttggacattaccatccaagcaataaaaatcgctatctggctcaataagtaaaacaagaacatcgaccataacgcgctatagaacgtgttcatggatgctgtacccttttttaaatcaaccaaataagtagttaaagcagtaactgaacggcctaaatatgtaggtgccataacctgtgcaccactcgaaatcagagaaaggataactacaatagtgattcccttccaataaggcttcaaatacttagcaaaatagcgcaatgcctttttcgtattactcatttattcatttcctcctttcttacctttttgtgtcttgaagatttcttggtaaaccagcgaagtcttaagcaattcttcatgcgtaccttgtgccactaatttaccgtcatctaacactaaaattgtatcggcattaatcactgaaacaatcttttccgcaataataaaagtagtagtatcaggcagctcatgctctaaagcttgctgtactttcttctcactttccgcatccagagcagaagttgaatcgtccaaaattaaaattggtgctttagcaatcaagccacgtgcaatagatagacgttgcttttgcccaccggaaaagttagcagaacgctcctctacttcatgatcgaaagaatcgttataacgctcaataaattctgatgcttgcgccatattggcagcacgctgcaattcatgtaatttagcctgagcattaccttgacgcaaattagatgctattgtacctgagaaaagaactgctcgctgcaacacaaaagaaacagttttgcgtaatgcagcttcagttacatccttaatattttgaccgccaatttttactttacccttagttggatcatataaacgagcaattaattgggccaaagttgatttaccagcacctgttgccccaacgataccaaccatttgacctggcttaatcttaaacgaaatatcctttaaagtaggatcatccccatcaggataagtaaaggaaacatgatcaaactctacgctaccgctaagaggtgcaaccgaaccactttccacaaacttgacatctggttcagtctccaatacctcacgaatacgtccaagagaaatattagctcttgaaaattgcattaaggtcattccggcaatcatgatcgtaaatagcagggttaaaacatagttcacgaatggactgactaccgcaatatcacttggatgtgccgtaatatttttaccaattaaataaacaattaaagcaattacggtataagcgatcatctgaaaagctggcataattgcagagaaccagtaaccaatcacaatgttgtagtcattcaattggtccgaagtttgatcaaactttttaatttcttgtggaccttgattaaatgacttaaccactctcacaccttgcaatgtttcttgtgcttgattagaaattcggtccatcatttcttggaatttggtaaacaaactattcatttgtcttaaaacgtaagcgccaaaaccaaaaataagtgcaaccatgaccactggtgcccaccagaagcgcggaataatcacgatacagaagataaatgaaccgacaattaaaatcggcaaccgcaacatctgcataaatagctgcatcatcatgttcattacctggttcatatcgttgatcaaccgtgtagttagagaacctgctgaaaatttcttaatattaccaaaagagaacgtttgaatcttagcataggtatcttcacgtagatcactaactactccttgtgcaattttcgctgcaaaataaacgttaaaaatacccgaaataattgcaattatacctaggactactagccagattccatcagacaagactgcttgcttctgattcgccatcaatgccttttgaatattttccaataatttaggctgatataatccagaaaacgctgaaactaagatagcaataattgcacaaacaacatcttttttataacgctttaagtatggaagaattattttaaagttttccatttttactcctttcttcacttaaaaaatgccaaaaagtagtgctccattcttctgaaagcttagctaacaatttcattttgtcagttcccatggcttgagccgttttttcctctaactcaaatagaggacgcaacctgtcataagcatatttccgccctgcttcggtaagctggcaaaatcgaactcgcttatcgctaggatcaacagtcatcgtgatatgatcatgatcacgcagaatcttaattcctttgttaatcgactgcttgggtaaatcactcagatttactaattctctttgtgtcaattttccccgaatcagtaattcatacatgattaccactaaatagtcaggcaagtcatgatcctgctcccattggctataagcacggctgccatggataattgatagatttaatttttctgtctcactaattttcattacttcaccaccatatttagtctacatgcataccaaatatattagtatgcacatggactattgtcaaatcattttgtcaaaaataagactataattaaagtaaagaaacaatttttgcatctaaatttcaaattggtataataaaaaaatcatcaagtaaaacaaggcagggattatatgcgtaaaaagtttttattaataatttcaatagtggtcctgtttgctttgccattaagtggctgtaagcaaaacaaaaagcaaaacgtttatcaagcagttaaaactagtaaaaccattaactggggcgtcaaagccgacacgccattattcggctcaataaatattaaaacaggcaaacttaatggctttgaaattgatttagctaatgcattaacccatgaaatgctaggcaaaaatgtcaaagccaatttcataacaacaacggccaacaccaagattcagcttctaaaaaacacgaatgtcgacgccgtcattgcagcaatgaccattacgcctgaacgtaaaaaacaagtcgaattcagtcacccttactttcctgctggacagtcaattatggttgctgacagtagcgccattaaaaatgctaaaaatttgaataacaagaaagtgcttgtagttaaaggaactactgccgccgatgctatccatcaagttgctcctaaagcggaaattttacaattcgatgattacggccaagcttttgccgcattaaaagctggacaaggagatgcctttgtaactgataacggaattttagctgggattttgcgtgatagttccggctataaattagttggcggcacctttaccaaccagccatatggtattgcagttaataaggggcaaaatgacatgctcaagcatatcaacactgcattagcaaaactagaaaagaatggcacatataatcacctagttaaaaaatggtttggcaacattcctggtatgaacattaaagaactagaaaagaagtaagaaaaaggctaagatcaaaattttgatcctagccttttcgcttatttagcaatgaaatcaagtaaagtaaacattacatctttatttttctcaggcacaccatgattaataatctctgtaggcgtttgatgtaaatccttattttctaaagcatatgctccatcattaatagcaatctcacgtacattatcaatttgcggttcaaagtggaactgcaacccaattacattatctcccagtaaaaagccttgattcttaactagatcactagagaataataacttagcttcggttggaatttcactcatttgttcatgccaatgaagagctgttaacttatccggaattcctgtaatagtctgatcttgcaaataaactggtgcccaacctacttccttagcgggtgcatcaagtaccttatagcccaaagttttagcaatctgctggctaccaaaacaaattcccaagatcggcttgtgttgatctaacatttgtctaatcaacacacgttcatttttgacccaatcaagatcatcattaggactgtttggactgcctaggactactaatagatctgtttcatcaacagttggcaaaataccaaaattccctggatggtaaacgaacatttcgttatctctagcatggcaccaggcttgaatagaaccaggtccctcattaggtgcatgctgtaatacattaacgcgcataaaatccctttctcactcaacaatatttttgtttttcattttatactcaattctagtggtaaacaagaagaattcagttaatcttttactatatctttagaaactatatgtcaccttatatgatataatgttatacatatttttacatctggaggacttttatggacaatcaccttaaacgcagtattggcttaggttctgcactttcaattatcgttggaaccattatcggttctggaattttctttaaacaagcttcagttttagatagcgcaggctcaacctttatggcacttttagcatggattttagctgggattatcacattaaccgccggcttaacgattgcggaaatcggtgcccagatgccttatactggtggactttacgtctatattgaaaaaatttacggccgcgttttaggttttatggctggttggatgcaggctattgtgtacggtcctgctatgatagctgcagttaccggttttttaagtattatggtgactaatctctttggcatcggcaccgaatggcgtattcccattggtttgatcactatcatcgctatcggtggtttaaactttttagaaaataaagtcggtgcagcctttgctataatcactacaattgctaagatgatccctatttttgcaattatcttctgcggcatctgctggggtgagcaaaacgctgtcgcccaaactgtgactgagctgaatcgatcaacaggtggtcttggcgtagccgttctcgctgccctttttgcctatgacggttggatctttattgctaacttaggtggcgaaattaagaatccacaaaaattattacccaaagcaatcatcattggaatcactacagtattagtaatttacgcgttaattactattggtatttttagtttcatccctgccgataaaattcatgcattaggtaaaaattcaaccacttatttggctgacgctattcttggtccaattggcggtaaagttctatctgtcggcattattatctcaatgctaggcactctcaatggagaaatgctcacctttcctcgtattatttacgctatggctaagcgcggggatttgcctttctcaagatttttatcatacgttacacctaagggaaaagcaccagtcattgccactatgctcttaattaccttaactggaattatgatgactttcttcgatcctgattacctatcaaatctctgcgtcttcacaatttatagtttctatgttttagcattctttggcttattcattttaagatacaaaaataaggaccaacgtcctttcagcgtaccgttttatcccctaattcctttagtagcaattgcgggcgggctcttcgttttagtcagccaattcttcaatgatcccgctggcgttttgctttttactggaattaccgctgtcggctggccaattttctttttagttaaaaagatgagcaaagcacagaacacgattatcgaagactaaaaatctcaaatttttcttgttcatttttaataattatgatattctaattaaaattaatttaggagattcaattatgatttatcaagacaccacattggcatactcatctagctcaagttccaactgaacttgagtgattttggtgtacgtaaatcagcagccggattcactcaatcgtttctagacgataaggtgaatccggctatttttgtataaaggagaaaaaatggacaacaagcttaaacgcagtattggtttcggctcagctttttcaattgtaatcggaactatcatcggctctggtatcttttttaagcaggcttctgttcttgacagtgcaggttcaactacaatggccttactagcttggatttttggtggtctaattaccttggctgcaggtctcaccattgccgagatagggggcgcaaatgccctacactggtggtctttatgtctacattgaaaatctctatggccgcattttaggctttatggctggttggatgcagatcatcgtgtacggtcctgcaattattgccgccgttgctggttttatgagcatcatgatgactaacttttttggtttgaatcattcatggcgcattcctttggctttaatcacagttttagcaattggaatcatgaatttcttcgaaaataaggtaggtgcaatcttttcagtcataaccacgattgccaaaatgattccgattgctgtaatcaccatttgtggaatctgttggggtcaacaagatgcgattaaccagactgtagcagaggttagccaacacactagtaacttcggtgttgctgtcttagcaactttatttggttacgacggttggattttaatcgctaatttaggcggcgaaatgaaaaatccccaaaaattattacctcgagcaatcattgcaggaattacagctgttttggctatttataccctaattacaattgggattttccgcttcatccccgctaatcaaattcaccaactaggcgaaaacactactacttatctagctaacgcggttttcggtgcaatcggaggtaaaattctttccattggcatcatcatttcaatgatgggaacattaaatggaaaaatgctgacctttcctagaatcgtttatgccatggctaaacgaggagatctacctttttctaaatacttagcctatgttactcctaaaggaaagtcacccgttgtggctactttatttattgtccttttagcccttttaatgatgattttctttgatccagaccacttatcagatctttgcgtctttacagtttattgcttctatcttttagccttctttggaatttttatcctaagcaaaaagaataaagcagagcgtcctttcagtactccactttatccttttgtgcctataattgctattttaggcggtttatttgttttaatcagtgaattaattaatgatccagctggtgttttgctttttgctggaattgtcattatcggcttaccgatcttctacgccgttaaacgcatgaataaacatcgcttgtattaaagcgacttttctacactgtagcttgcacgccacaattcttccattttagctaaacgatgccaatctcctttttgacacattgtatacaaggcatgagcaggatcataagcaattggattgccctctgcttcttttaaataagccccaacaatgctgattaacatcatccgaaagcgttcaatctcattacggctaaagtaagtttcaaaatacttagttactaagcaatcaaccgttgcatgcgaagctttgcgcaaagaagcaggattcttacgatagttatacaaagtataagttgaaattccagttgctttacttaaactagtaatcttaacattacggtcagttattagtttctctgctctttgtacatcggttaaaattttgggatgcttaaagtgagctggcattgggatacgtttacttaattctgcaattaccttttcaacagcttccttcatttgctgcgtagctacttcttcgtttaccttgtcattaagcaattttcctactacaaacgtatgatcagtcacttcataccttttagtaactgcattgtaaaaataaccttcaatacctgtaatcttaactgcatcagttccagcttttgcatagtcaaaaaagatgtgttgctgatcaccagttaatggtgaaaatggcaaattatctagcgtaaaaacttgtacatttaaagtataatctgaatgagcgggatcatctgcatcacaatgatacatcttcacttcccgatcatgaataaaatcttcaaaaataagattttttccatattttttcttcatttcttaatccccttttatatagtcctattatctattataagcaaaaaactagcttttaaaagctagtttttgtttttattagaaaatattcggtttagggcaaataattaccagcagctaagtataaatcgtaccactcttgtctagtcaatcgaatcttggcacctttagcagaatccctaatgtgttgcggattcattgatccaactagcatttgaatatttgcaggatgacgtaaaatccaagctgcagcgatcgcatttttacctacctcatacttatcggccagtttttgcaactcttgattcaacttggggaagccatcattatcaatgaaagtcccttcaaacatgccatactggaatggtgaccaagcctgcacagtaactttgtgtagacgggcataatcaagaaattggctatcacgatcaactgatggtttatctaccatattcatatgcatcccaaagtcaatcattcctgtatgtttcaggctaaattgtaattgattgaacatcaagcgctggctcaagcaactttgtaacaatttaaattgagccgtatcaaaattagatacgccgaaaaagcgcaccttacctgctgcctgtagttgatcaaaagcctcagctacttcttctggatccatcaatgcatctggtcggtgaagtactaatgaatcaagataatctagttgcattctttccaaaatttcatcaacactatgcaaaatatgttctttagaaaaatcataacgttttcctggaacaattcctgttttagattgaataaacatctcttcacgcttgatctgcatttggctaaaagcttgaccaaaaatctcttctgattttccaccgccataaatatcagcagaatcaatgaagttgatcccagcatcataggcggcttgaattgccacttgagcctctggaactgatttttgattcattcgcataatgccaagtgccatcgctggaatgcttaaagtagtacatcccattttaattcgtttcataatgtaagtcctttcattctttatttacctcacatcatgaaccaaaaatagctaagtttcaaccacaagaaattcaataatcttttattaatatatcttagctactgccgattgaattgattctttatctaagaattcgtcataacttgtatcttggcgactaacaatacctttaggtccaacttcgataatgtggttagcaatagtttgaataaattcatgatcatgtgacgtgaataaaattgaacctggatatgaaacaagggcatcatttaatgcagtgattgactcaagatctaaatgattagtaggatcatccatgatcaatacattagccggttcaagcatcatacgtgacaattgacaacgaaccttttccccaccagaaagtactttgatcttcttctcaatttcttctccactaaagagcattcgacccaagaacccacgcaagaaagtattatcatcttgttccttagtcgcatattgccgtagccaatctaagattgtaagttcatcattattaaagttagcgttcaaatcgcgtgacatgtagttaaaggccgttgtttgaccccatgtaacggtaccagtatctggcttaagtttaccagcaacgatatcaagcagcgcagtcgttgctaaagcgttacgcgataaaaatgctaccttatcaccaggacgcacgatgaaagacacattatccagaatcttttcaccgtcaaccgaataagaaacgttctccaccttaactagatcattccctaagtcacggtgcatttcaaactttacaaatggatatttacgactcgatggtttaatatcgtccaaggtaattttatcaagttgtttctttcgagaagttgcctgacgtgatttagatgcattggcagaaaagcgggcaataaattcttgtaattgcttcatcttttcttcttttttagcattttggttagcagctaattcattagctagcttgcttgattcataccaaaagtcatagttacccacataaagctgaatcttaccacgatcaacgtcacacatttcagtacatacttgatttaaaaagtgtcggtcgtgggaaacaacaatcacaatgttagggtaatcagccaaaaagtcttctaaccattcaacggtatgaacatccaaaccgttagtcggttcgtccaatagcaaaatatcaggattaccaaacaaagcttgggccaataagaccttaactttttcgctttcaggtaaatccttcatcatcatttgatgttcttcttcaggaatccctaatgattgcagcagcttagccgcatccgcttccgcattccaaccatcaagttctgcgaacttgctctctaattcagctgccttaaccccatcttcatcaccaaagtcaggtttggcataaagagcatctttttctttcattacttgatacagttccttgtgcccttgaattactgtgtccatgacagtgaagtcttcgaaagcaaagtggtcctggttcaagctggacatgcgctcattgggatcaattgaaattgaacctgttgttggttccagtttcccctctaacaatttaagaaaagttgacttaccggcaccattggcaccaattacgccgtagcagttgcctggagtaaattttaagttaacgtcttcatagagtgtgcggccaccaaatcgtaaactaacgtcggatactgtaatcaatctctttacctcgcttaaaatataaaattatgtttaagtatatcaaaaaagatggtcccttataatagagaatccatctttttaagcaatttattaaaactttttgaagctatctagcttttcctgggtaatatcacgaataattgcagtagctaaatcaactgaagccttaaagtccttataactactgaaacaatatggtgaatgttcatagcgcaccggaataccgatgacaattgttggcgcaccattttcgtagtaaattgcagcaccatcctgaccgccaccggttctaaccgaacgagtatatggaatattatttttatcagctaaatcacatgcatattgttggaacttaggatttggtaaaaatgtcgtatccatatcgcgcaacattgggccacgttttagaccagtttgagaaagccagtcaggcgtaaaagtatcatcagctggacagctttcgagtaccagacaaagatctggcttaacttttctagccgttacataggcgccacgcaagccaacttcttcttgactagaaagtgcagccactacgtcaaagttagtttcttcacccttcaaattatcaagcacatcaaccatcgcaccagcaccaaaacgatcatcaaagtctttaccgaagaataaaccggacttttcatgatattcgcatttaacatcaacaaagatagggcaacctgtatcaatcttgtagtccttgattgtctcctcacggctagaagaaccaacatcaattgacatatctgccacatcaggtacactattgcgctcagctgctgtcatgaagtgaggcggcttagttgctacaacgccagggatatattctccatcacgattgcgcactttaacgcgcaaggctggaatattatattttacccaaccaccaagtggaacaaacttaattaaaccattagggcgaacagcttgcgtaatgaagcctacagcatctgagtgcgcatcaagttgaattaccggtcgatttcccttattttctttcttggcggccccggatttaaaattgaagtgcaacactaagtgttaaacaaaaaggccatgaagacctaaacttgaagtgacgaaaaatcaagaaaggaagatcttcatgaccaattcaaattctagcatttctaagcactatcatcaattaaccagcgtacaacgtggacaaattcaagcaatgctggattccggcataacttcccgtactgttatcgctcaagaagttggctgccataagtcgacaatcagtcgcgaaatcaaacgcggaagcgtcctgcaaagagacagcagctatttattgtatgagcactattacgctgatactgcacagatttattatgagaagcgtcgcaaaaactgctatcagcgcaatccattgaagcattatgctgtctttttgagaatgctctccagacgctttaaagctaaatttgatgccaccagcatcgatgagttcgttggtgaattcaaaaggactatgccaggctacccttgtcccagcacaccaaccgtctatcgctatattgatcagggcttgctggacataagcaatattgatctgcctatgaagctcaaaagacgcaggaacaagcgtcatcacagccatggcggtcacgctttgcacaagaagcatcttggcaattccattgaacagcgtcctaaagagattgaagacagaaaagctccgctgcactgggaaggagatctggttaaaggcgtcagacgcaagaatcagcctgctttaatgactttgactgaaagaaccacacgctttgaagtagttatcaagattcctgactatcgggcaagcacatgccaaaggctgcttcaaaaggagattgacagacatcctgcctggtttaaatcaatcacgtttgacaatggctctgagtttgcggatatgaccaagatcaagggctgccagatttactttgctcacccatattctccatgggaaaggggcaccaatgagaactgcaatggtcttttgcgtcaattcttccctaagagcaagagcatgaaagacaagtcaaaagcttatgttcaacaggcaactgatgccattaaccacaaatatcgccgaatcctccaatatcacacagcagaggaactcttcaagcaatatatctcttcataacctaactgttgcacttaatttgacaattcaggaattatttattttaagaatgttacaaggtatttttgcaggctttgtttctaattccaatgctctagttgcgactgaaactccgaaggaaaaatctggacaagcacttggcactatggcgtctagctttactgctggcaacttactcgggccatttattggtggagccttagcgtctattttctcctatcgcgttaccttctttattacaggtggtctattattaattgcatttcttttgtcattgttctttgtccatgaaacagacttcaagccagtaactgaaaagaaacttgataaagcaagcggagtaattaaagaattacgctcaccgcaattaatctttggcttgcttttaactactctaattattcaagctgcaaataattcgattaacccgatcgtttcactctatgttaaacaattgatggctaaccacggtaatgtcgtctttatttccggggtaatagctgctttgccaggaattgctacattccttgcggcatcgcgcttcggtgcactcggtgaccgaattggaactcataaaattattattgctggctttattggagccacaatcctcttctttttgactgcttttgtacaaaatactgttgaacttggtattttacgctttttagtcggctttactgatgcttgcttgttccctcaagtgcagactttgcttactaaaaatacgccagcaaaaatcacgggccgaattttctcttggaaccagtctgctatgtacatcggtaatattttcgggcctctgctgggttcaactatctcaggattaactaattacagcactgtctttatcgttactgctgggattgttgtcttcaatttgattttgtttagatttaatgtgattaaaaatttgcagtaaaaagtgtctgggaaaaaactaagtctcagatcatgaaaaaagaacgttgaatttttgtttcaacgctctttttgtatacttttagctccagccttgatattattaaatcatcacaaaataaaaaaggtggaaactaacatgtacaagaattatatcacaggtcaaactgctttaacacttaatctagattttgccattccggccaatcatttggctaatgtcatcagctggtttgtagattcaattccagaagatgttttagtaggcaagactgctaaaacgggccgcccagcctatcatccagccatgatgctcaaaatactgctttttgcttactccagaagagttttttctggcagaaagattgagttgatgctggaagaaaatctgccaatgatgatcttggctgaccagcaaaagatttcatatcatactatcaataattttagatcaagcagccatgccaatgaactgattaaaaagagctttatctacttcactaacctgttagaagatgaaggcttaatcaatgaaggtgctgcttttatcgatggtactaagattgaagctgatgctaaccgctatacatttgtctggcgcaaagcggttgaaaagtatcatgaaaagctgaaaggccaggcagttgaactttatgatgaattgattactaaagaagtagtcaaagaaatggaaaaagaaaaagttcaaactagtcaggggctaaaggaattagctcaagaaactgaagcagaaattaacaagctgactaaagagattgagcaggaaaacaaagccattcctggcggttcacctcgaaaagccaagcgacgtggactaaaaaagattctgcaccggctaagaaaagattatgtgccaagaatgcaaaaatatgaagaagccgaagagatctttgccggacgcaacagttattccaaaacagatcatgacgccacctttatgcatatgaaggaagaccacatgaaaaatggtcaattaaagcctggctacaatattcaagcagtcacgaccgatcaatatgtagttgattatgccatctttcctaatccgacagatttcaaaactttggagccggttttggatcaaatgaccgtgttggacaagtttgacaaaatcgtcgccgatgctggctatggcagtgaatacaattattcgatgctggaggaaaaatatccagacaagaagtactttattccctacactatgtatgaaaaagaacagaccaaaaagtataagaatgatccaactaagctaatcaactggtactacaatgaaaaagatgattattacattgatcatcatggcgtcagattcaatttcaaatattacagccagcgcaaggatcgttctactggtcaggtccgtgattttaaggtttatgaggcagacgagttccagctaacgccagaattggaacaattggctaaaacagctagcggccgccagcgccaagttcgctataatcctaactggcaatatttaaaagaaaaagcaaaagaagttctccaaagcgaagaaggcagacacatctatggcatgagaaaatatgatgtagagccagttttcggacatttgaagaacgtatttggcatgcgcagaacgcacctgcgaggtaaagagaaggtcgaaaccgatatcggaattgcctttatgatgatgaatttgaacaaatattgtcaaagaaggtggctgaagggccgatttttattgttaaaaattttaaagagaacaaaaaaacgatcaagattcttaaaaaaggaaatcttgatcgtttttattcatctggaagctagttttttcccagacacttttctattccgcagctttctttgcttcatgatgattataaataaagtttgcaacatacccacaaataattagcaacaacgatacaatcataatttctctaattccggtatgaaaaattgtccgcattgttggcattaacgccttaggcaaactcttcgcagattctgcgtcactcaacttattcatcatggtcatcgtaatattgtggtgtccagcaattccacgtgctagagctaaattcataatcaccccataaacggcagccataatagtttgcgctaaaattctaatcaaaaaactaagcgatgtagcaggtgccatatccttttcaccagcgtcaatctgcacttttatttgaagaataacgaagattgagcctacacctaaaccagataacgctgcaatcgacatcaaaatctgatatggcgtactaattggtacaataattaaaccgattactgttattgcaatcaatgtaaaatcgaaaattaacaaatgataattattaaaatgtctgagtaaatgcggcgtactttgtgaaccagcaatatcaaagattgagttaggaatcaacgtcatcccaccgattaaggccgttgtccctaagattgcctgcgaccacatcggcaaataagtgttaactgcaatatatgcaccccaggcaaaggcaaaaagaatgaagtcaccaactaaagctttattagtaaaaaccgataatggcacgataggactagcagcttttttctcaactaagatgaaccagacaagcattacgatcccgataatcacgaaaatagccactagaaaattactagctagtcctaacatctgaattccaatcaaaaagcaagtcaaaccgccaattagggtaaaagcacctagtcggtcaaagacagtattgatgtttggcttacgaatgccacgataaaaaagaaaactcaagataattgataccaatcctaatggaacattgatataaaagacccagtgccaggacaaagcatcaacaatccagccaccaactagtggaccagcaatacaagcggccgaaaaactagctgcaatataactcaagatgacagttctacgtttaatattcggataaatataaccaacaatcacataaggaagagaacccattccaccagcaccgacacccatcagtactcgagaaacaaggaaaaagtaaatatcgggagccactccttctaaaactgaacctaaaataaataaggctagtgacagttcgaaggcaaatttgttacccattctttcaccaattttactccaaattggcactgagaccgacattcccagtaaaaaacaggcaacaatccaccccatatactgaattccgtgtagatcggacacaattgctggaatcgccgtattaataattgtcgcatctagccctgacataatattagccagcaacaaagacaaagtaaccattgatatttgcttcttagtcatttaatcccacctttttaactctaaaaactactattactcatagtatgcaagatttaactagcaaaataaagcacaatatttttccactaaatcttgacaatctgtgtttttccgagttaaatataaagaaaataatagtgatgacctttaaagttagtcccgtgaggctaagaaggaaatctgcacaagctaatactttttgtcgttagctaatacagaaggaccatcttgagccatgcgctcttggtggtctttttcttttggtcatccagaaaggaaaagctatggcaaaagaaataatcgatgctttaagcatgaaacgcgccttgatgcgaatgacctacgaaattgtcgaacgcaataaaggtactaaagatcttgtattagtcggaattaaaactcgcggttggtacttggctgagcgaatcgccaaaaatttgaaaaacttggaagatgttgaagtccctgtaggggcaattgatatttcacaatatcgcgatgatttaccagaggctgagaaggaaaagatgatccacagccaacaacttgacttcgatatcaccgataaaaacgttatcttagttgacgacgttcttttcacaggtcggacaattagagctgcccttgatgcgttaatggatcaaggccggcctgcaaaaattaatttggctgttctagtagatcgtggtcaccgcgaattaccagttcgtcctgattttatcggtaaaaatattcctaccgcaatgaatgaaaaagtccaagtctcaatgaccgaagtcgatgagaaagacagtattgaaatcgttaaataggagttttaaatgaataaaaaagaaaagtacagaaaccctgaggctatcttagacgtttatgaaaagcctgaatttggccaaggcgtactgctatccttacagcatatgtttgctatgtttggttctaccgttttagtgccaattttaattggaattaacccaagcatcgctctactttcatcaggaatcggtaccttggtccacatgctcttgacccacttcaaaatcccagcatacctcggatcaagttttgccttcgttgctacaatgcaagccttaatgaaggctgatggctacccggcagttgcccagggtgcgatcgcttctggtttagtttacgtagttgttgcgatcatcattagcaaaattggttcaggctgggttaacaaagttttaccaccaatcgtagttggaccaatcatcatcgttattggtttgtcattagcaactactgccgctaatgacgctatgatgaataattctaagtatgatttgacttacttcggtgtagctatcttcactttggtcatgaccttagttttccaaatgtgcttcaaaggcttcaccagtttggtttcaattatgctaggaattatctgtggctatatcttatcctgctgcctcggaattgttgatttctctggcgtggaaaaagcagcttggttcacattgccagcacttgatgtgcctggaatcagttaccacttcaaatggtatcctgccgctattttagccatggcaccaattgctttcgttacaatgacggagcacatgggccacattatggtattgaattcattaactaagcgtgacttcttcaagaatcctggcttacacagaacgatgatgggtgacggtctttcaacgattatcgccggtttcattggtggtcctcctaccacttcatacggtgaaaacatcggtgtgttagctatgactaaagtttactcagtttgggtattagctggtgccgctgtttcggccattatcttcagttttgtcggtaagcttgccgcattgatcgaatcaattccaatgccagttatcggtgggatctccttcttactctttggtacgatcgcatctaacggtttgaagatcttagttgatgatcaaattgactttggtgaaaagcgtaatatgttaattgcttcagtcattttggttatcggtatcggtggtgcttacctacaactgggcaatttccaacttacctcagttgccctttccaccattatcggaatgcttttaaactggattttgcctaagaaagcagctagtgaaaaggctcaagaagaaaagattaagaaagaaaaacaagaaggtaaaatttaccaatagatagaataagccatttaaaacccgttagttatcgcaatgatagctaacgggtttattttttactctcactttgcgcacacaatgttgtaagttgtgcgaaagttggcaaaagttagtgtaagttaattgtaaaagcttaagaagctaacaaagccctatatatcaaggcttcgagctactttagtaaaaactttgctctcactttgcgcacgcaatgttgtaagttacgcgaaagttggcgaaagttagtgtaagttgcgagagcaatagtatataatttattgacacaaataaatttaagtcatgaggtgacattaaatggactttttaaacttcaaagcaattacacaaactggtaattttaaaacaccatctgaaaatgaaaacatcgaatacaaagaagctagttggaaattacctaaatcattttgggaaactgttagctcttttgctaatacttcaggtggaataatgagactgtaaaatagtttgtgtaaggatgaatgattccttaaatttatttctttaaacattagaaaaaggagttcctttctcgtatgattggtttgaacaaaaaaacacatacagaaagaagaactccttcatgaatgattttaccaaagattttgctcaagctctattcaatccagacaaaataaatgatttattgcgcaaagagctacaacaggctgttaataacttgttagaagctgaattgactgcctttctgggctatgatccctatgccagaaatggctggaatactggcaactctagaaatggtgcttatttccgcaaagttcatacgcaatttggcccaattgaagtgcaagtgcctcgggatcgcaacggtcaatttcatcagcacacgctgcctgactacaagcagcactcggatatcttggaaagcatgattatcaagctttactccaagggcgtgaccaccagggaaatagccgatctaattgaaaagatgtatggcagccattacagtccagctcaggtatcaaatatttccaagcagatgattccaaaggttgaggcttaccacaaacgcaagctaagcgacaagtttttctgcgtctatttggatgcgacataccttcctttgcgccgagaaacatttgagcgcgaagcagtctatattgccattggcatcaagcctaatgggcacaaggaggtcattgactactgcattgcgcctagcgagaacattgaagtctggacagatatgcttcaaaacatgaaatcccgaggcttaaagcaagttgagctttttctttctgatggtgttgttggcatgaaaacagccttggccaggacttatcctaaagctcattttcaacgctgtttggttcatgtcatgcgcaatatctgcgctaaagtacgcgtcgacgatcgtgaaaagatcatgaacgaattcaaacaggtgcatcaacagacaaacaaagaagaagccacagctgtcctgcatgacttctataccaaatggggcaaggtttacagccatgttatcagaagcttgaaagacatagaaccagatctgctggtcttttataactatcccaagcagatcagagcttcaatttattcgactaacatgattgaatcatttaacaatgtgatcaagcgcaaagctaagcctaaggcagagtttccaactgaacagtcgcttgatgcttttattggtattcaggcaatgagctacaatgaccgttatttcaatcgaattcataaaggctttggtcaggttcaggacaccttagaatcctactttgattaaataaataattaaaaaatcaatttacgagaaagaactatttacacaaaagatttgacagtttcggaataatagtattaggcatagcagaagataagaataaacatgaatttagtataactggtgtagacaatgttgaagacattgaaacacaaattttcaatgataataacaatatttcatgccttaatcgacctgtaatccaaaataatgatgttcagatttctttttttcaaaataaaactattattcaagtaataattcatccagaaccctttaatactcgtccaataactgcattcggtaaagcatatattagaactggtgacagagatcgagtagctactaaagagcaacttaaatattttacagttgaaagtcaaagcgagattgatactcacttactaccttcgacctatacaatagaagatctagatgcagaaagtatcaaagaatatcgcaaaataattgaagaaaaaggtattattaatactaattctcaacttagtgatcaagaattcttatattcaattggtgttttcagaaaagatcgattaagtaattcaaatgaatatcatcttacagatggtggtctccttttcttgggaaaatatatttcgataacagatcgtttcccacgttttcaattagactatcaacaatataatagcgataattctaccaactggaatgatagagtttctgcaggtgacatgaattatcccactttaaatatcttttctttttataatttagttttagctaaaatagaaacaaatatacgcatggtgctagttaaatcgttttagttaataaaaaagtccaatcttgttagactcgacttgtaaatagtaataatagaaaagagtctgatctgattgaactgtcttaagcttaagcgttttagccaccatttacaagttagttttaaagatttagtgataatttgtcggcactggtatcgtttgtatgcaccggctgagtttactcatcggcgaaatattgatcaaattaaaactacggacagtctgattttggctttacttatctggcaagctaagacaggaattgaatcacaaagaagattctgtgaatgtttcaattgtttatcacactcacgttttaatcggcgttcacgtcagctattgcaattgatttatcagatacggcaagaaatgaataaaaaggttgacctgaatggacatttcttgatcattgacagctttccggtacctgtttgccaaccaattcgcaactatcgtgctaaaatttttcgcggttatgccaacattggttataaggccaccaagaaaatttacttctatggtttcaaagttcatgccattgttagcgatgacggttacattcttgattatgtcgtaacaaaagcatcagttcatgatgccaaggagacagttgaactgctggaaaatgcccatccatctaattactatcttcttggcgacgaaggctatttaggcaaagaactgcatcaacagctaaaacaaatgggttatgaactttggacaccatatcgtaaaaatatgacaggagctaaaaagcacaatgatcatcaattgatggctattcgcagaacaattgaaagcgacttttcgcttctgacctattacaatgccgagaacaatcgagcacgtagtctgataggctttcaaagccggttggaaattgcaattttagcttataatttggcttattgtctagaaagatttaactagcaccacgcgtacaaatatacctgatccatttattcaaggtaatgaccttagtagaacgtcctatcacaacgatctaatcatcgcagctaaggaagccctagtcaattgtttaatgcattcatattatgatggtatggtaggtgtaaaaattgtagatagacctagttactttgaatttacaaaccctggtactatgcgcgtaagtaaagaatcgtttttacgtggacaatattcctccattagaaatactgaaatcgctagtttattcagacgaattggtgtctctgaaactgcagctagcggtggtccaagaattcttaatactgtgttgcaaaataatttaaatgatcctgaaattaacattgattatgaaatcaatactactcgcattcgtatttttaagacttttgcaattgataatcaggaaaaattaactgaaccagagaaatttattatgtcttttgctagcagaaatcctaatttttcaataaatgatattgttaaagatccgcagaatcattttggtaaacaaaccacgattagaaaatatgtaacttaaacttcccacacgcaaaattgcttgtttcattgtgattctgcgtgttttgacaaatataaaaggcacaagtccttttcattgctataattatattgaccaaaacataatttatttgcatgaaaggcttgtgccaatgtctattttaccatctcctgaccaacaaaatgaacaactattttcaaactcaatcatcagcttcatcaagaagtttcaggtgatcaagctgttgagaaaatgtggcttccgcaaggaaaaaggcattagcctgttcagcttgtttctttacgttttaagcaatgtctttcgtgaccgcagcttatatatgcagctgaaaatggatcattttcaagaaaatttttccaagaactcatattaccgttttatgcgcaacgttcacgtcaattggctccacttcaccacacttctgtctgcgcaaatcattaataaccacttgcgatctttgacttcagaaaaacgggctgattgctttgttgtcgatgattcctacttctctaggaccggcttcaagaaaacagaattagtcgccaaagtttttgaccatgtatcaatgacttacaagaaaggttttcgcatgatgaccctgggctggactgatggagcttctttcatgccaatcaattcagtgctgctgtcttctcagaagctacagaatatgattggcgaaaataaagtttttgatcagcgcaccattgctggccaaagacgtatgcttgcccggactaaaggcacagacgtgatggttaatttaatcgaccaagctatgaaagcaggtcatcaagccaagtacgtgctgtttgacagctggttctcaaatccacatcaaatcgtccagctcaagcaaaggaagctggatgtgattgccatggttaaggttagctccaaaatcaaatatgaatttgagggagaacgcaaaaacatcaaacagatttatcgcagctgtaaaaagcgatgcggccgttctcgctacctgctgtcaatcccagtcaaagtcggacgccaggacaaagacggtgctaaaatagatgcacggattgtctgcgttagaaaccgtgccaatcgcaaggattggctggcaatcatttgtaccgacatgtcgcttagcgaagatgaaattatccgcaactacggcaagcgttgggatattgaggtttttttcaaaacttgcaaaagttatctaaaactaagtacggaatatcatggcctgtcttacgatgctttgaccgctcatgttgccatagtttttactcgctacatgcttatgtcagttgccaagcgggacgatgaagatgaacgcacgctaggcgagctgttctattgcatgattgatgagctggcggacattacttttagccattccttgcaattgattactgatgcaatgctggccagcgtaaagcaagtctttcatgccagtgaagcacaaatagctgaattcacggctgactttatcaatcgtttacccaaatacatgcaaaaattgttaaagaaaactagcaaaaataatatagaagcctaaagccaagcaagatcaagagattactggcttatttagtgtgggaagtttaagtatgtaaattcattagtagagaagcatttactatccaatgagaaaattggcaaaaaatatatctacaatttacagaaaaacaatgattatctaaatcgcgttaagcaccttaaacatcttgaagataatttactcaaatagatcattcaaaaagctcaacctacaaaattcatgcagattgagctttttcatcttatttatcttcaaatattctaggcttatcgtcatcaagtgaaacatgcggaatttcggtgttatttgtctcaacttgatccttctcagacaattctgccttcattaactcacttttggctttactagaagtattgcctaaaagtaaagttttctcctgcggcgtattcaccattgcctgtttttctttgaattttttataaacaatcgccgctactgcaccaatagctccagcaacaccgataattgtgccgattaatctcatctttttcatagggatcacctcgtattttgaaatcactttcttattcttaattatatctaattatgaggttgaacacatttttaatgcctattacctaaaactttccgcaatttccggatccatctcatcttctaaaacactgtagccttgatccaaagtcttgatcaatgccatatcctcatcatctagttcaaagtcaaacacatcaaagttttctgctaatctagccttatgaactgacttaggaattactacataatttctttgcaaaaaccatctcagcatcacttgagcagtagtcttatgatgcttttctgcaatcttttgcaagacaggattagtgaaaatgtggttggctccttctgcaaatggtgcccaggcttcaggttgcacgccctctttttccatatattgctgtgatttccattcttgattccagacattagtctcaatctggttcacagccggctttacatcattaaaagtaatcaaatcagctaagcgttcattccaaaaactacttacaccaattgcccgaatgcgtccctctttatataaacgttctaatgctcgccaagtgccatagtaatcgttatatggcttatgaatcagatacaagtcgatataatctaactgcaactttttcattgaatcatcaaaagcttgcaaggtatgatcatagccatacttatcgacccagatcttggaagtgacgaaaatatcctcccgtggaatgctgctatgcacaagtgcatccccaactgcctgttcattgccataaatttgcgcagtatccacaagtcgataacctacttccaagccgttttctacaacttgttgagtttgagctaaatcatcaatttgataaacgccaaagcccaagcgtggcattttgacaccattatttaaaattacatagtctttcatatttcttctcgttttctagttaattattgctatttaattttattttaacatagcccatgaaattcgactttatttcgtgaaacatagatattatttcttaaaattaagcactcaagaaaagcctaaccagcatccctcaacggaattgccagttaggcttcttttatttttcaacttttgcttgataaaatccaaagctcatctgcttcaacattctagtaaaactatcaatgtctagctttttaccggtagtcaaagcttcaaattcaccatcaggatcaaccaatttgcggtcagtcctgtgaaatccatttctttcatagaatttcaggcgactaacacgctgcttataatttttcgccttcttggtaactggctcaatatcaatgacaatttgcttatcagggaatcgatcctctaacatcatcaagatcttggaaccataaccttgtcctcgcaatttttcattaatggctaaataggtcaaatagactgtattatcattctcagcataataagtaatgccgcaaaactgaccatcattataaattgcgtgaaacttaacatttcggtgtaatgacattgctaaaagagaaaacatggagaatctttcccaagctggaaaagccttcatatataacttcttagcgtcacgatatgcttttgtgccccatcgggcgggtttagagtctaaaatagtatccttcttttctaattaaaaattgattgttaataactctgaataatattattatacaaaactttttagctttttgaaactgtcaaatcttttgtgtaaatagatctttctcgtaaattgattttttaattatttatttaatcaaagtaggattctaaggtgtcctgaacctgaccaaagcctttatgaattcgattgaaataacggtcattgtgaaactgtcaaatcttttgtgtaaatagttctttctcgcaaattgattttttaattatttattcaaaataagattctaaggtatcctgaacctgaccaaagcctttatgaattcggttgaaatagcggtcattgtagctcattgcctggatgccaataaatgcatcaagcgactgttcagttggaaattctgccttaggcttagctttacgcttgatgacgttgttaaaggattcaatcatattggttgaataaattgaagctctgatttgtttgggataattgtagaagaccagcagatcgggctcaatttccttcaaacctttgatgacattgctataagctttattccatctggcatagaatttgtgcaagacagctgcagcttctttttggcttgtctgttgatgtatctgcttgaattcgttcatgatcttttcgcggtcatccacccggactttagcacagatattgcgcatgacatgaaccaggcagcgttgaaaatgagctttaggataagtcctggccaaggctgttttcatgccaacaacaccatcagaaagaaagagttcaacttgcttcaagcctctggacttcatgttttgaagcatctctgtccagacttcaatgttctcactaggagcaatgcagtagtcaatgacttccttatgtccattaggtttaatgccaatggcaatatatactgcttcacgctcaaacgtttctcggcgcaaaggaaggtatgtcgcatccaaatagacacagaaaaacttgtcgcttagcttgcgcttgtgataagcctcaaccttggggagcatctgcttggaaatatttgatacttgagctggactataatgactgccatacattttctcaatcaagtcagcgatttctctggtagttacgcctttggagtagagcttgataatcgtgctttccaaaacatcagagtgctgcttgtagtcaggcagcgtgtgctgatgaaactgaccgttgcggtctcgaggcacttgcacttcaattggtccaaactgggtatcaaccttgcggaaataagcaccatttctagaattgccagtattccagccatttctggcatagggatcatagcctagaaaggcagtcaactcagcttctagcaagttattaacagcctgttgtagctctttgcgcaataaatcatttattttgtctggattgaatagagcttgagcaaaatctttggtaaaatcattcatgaaggagttcttctttctgtatgtgtttttttgttcaaaccaatcatacaagaaaggaactcctttttctaatgtttaaagaaataaatttaaggaatcattcatccttacacaaactattttacagtctcgctttttgacataatacttatcttccattcaaaatttaagtatgcattaatattatttattttagtaaccagtcaatgacattaacttggctaattccattatcatcataacttcccggatcttcggtaagtaatatcttagggtagttatccttaatctctaaaaaaggtgctatttctctttgataagttttttcattctgaaccgttaaactaacttgatagtattcccgaataccatcgcgaatagcaacaaagtctacttccttttttcctaaatttcccacatacacttcatagccacgtctgattaattcaagatagattatgccctctaatctgttccccatattaggacgcttttgccccaacaacgctcttcttaatgaaggatctaccatataatacttattgttaatttgtaaatactttttaccagcaatatcataacgatcacagcgataaaataaatatgaatctaccaatttttctatatacgccatcactgttgcgcttgtcgctttaacgccattattcgatagcacattcgctaccttagttggagtaattaaattgccattagtatcggtcaaaaaagctgcaatatgttccaacaaggtagtatttcctcgttgcattctagctaagatatccttaaccaagacagtgttaataattccttgaatataagacagataggtattttcatcctctaattcagtagcaaaagggaatcctcctcgctctaaataacgattaaaagcttcttgatgggataactcaggaactgaggctaaaaattctttaaaagaaaagggatatacagggatttcaatatacctaccagccaataaggttgctaattcacctgaaagcataaaagcattcgatccagtgacataaagatcaacattttgcttgataaaaaggctatcaatagctttttcgaaatgagggatgtcttgaatttcatctaagaaaatataattcattttatctggaatcaatcgttgatcaatatattgatacaattttaaataatcagtaattgtagcaagccctaaatcttcaaaatttaaaacttgaatttgttcctgcttaacacctgctttaagtaattgttcctgatatagttttaaaatcgtggacttaccagaccgacgtactcctgttaaaactttaattatttgtttatcacgtagtttattcaatttatcaatgtatttaggccgcggaagcatttttaatcctttcaagttaatgtaattcaaattagtttaattttcacgtcaattttagcatataattcaaattagtttcaatctcttaaaacttctgagatgagttttaatttaatttgaatttactcaaaggcttaccactaaatttaaataaaaagaaagtctgtcaatctaacaaactttcttttttcataaataatcgttaactacatcaacttatatttcttcatcaattcttcgatataagtgcccttaaccttcttaagcatccctttaatcgcaaacttttcaggcattggcaaatcaagatcagccaacttcttctggtcattcaggtaatacatcgcattcatcaacattctgacatcaaatgcggaagcgaagacttctggtacaccgcggtcaatattaagcaaagtgtagacagcttccattgccgtccgaactgaatactctgtcgtaaagacagtgtctcttggagtttcggcaaagttaccaataaaggctaagttcttagaatgatctggaacaacctttgggcggtcgcctaaagctcttggcataaagtaagaagtaatatatggcatgtgaaccggaattgttgtagctgcggcagctatttcaggaattctttcttccggcacacccatgtgatagagccactcttcacacatttcaagcccattacaatcaggcatcgtcttttccacataattacccttggtatcagagaataaaccatataaccaaacaattaattcatttggtttttgcgccttaaagtgtggctgacggctgattgagtaacctaatagccaattagaatccttaatagtagttggtccactagttacgattgagccactgtgtggatcctttttattaacagcttcaataaatggcacaacatcatcattcttaaaggtaatagttgaagacatccgccagttagcctttggaatatccttgcaaaagacatcaggatggccaaagtcttcatcttgagctgctaagttcttccacaatcgccagcttgcacccaattcatgttctgctggagcgtgatgcagttgatctccataggtagtactctcagtaattgaaccattagtaacgaagactaagtcatttggtgttaagtcaatggtcttcttttcgccatcttcggttaaaataatttgtttagcaaccttttcgccgtcagagcggttaacaaagatattatcaaccaccgtattatagtggaagattacaccacgatcctttaaatacttgaccagcggcaaaatcaatgattcatattggttatacttggtaaaacgcaatgatgaaagattcttcaaggttgctacatgctgtacaaagcgcatcaagtagcggcgcatctccatcgcacttgcccatggttcaaaagcaaacattgttgaccaatataaccagaagttagattcaaagaattccttagtgaagacttcattaatcttcttattttgcaagtctttttcgggagttaaacaaagatcaacaatttccttcactgcctttggtgtcaaaagaagttgcccatcagtcggcaaagcttgaccacgatttacaattactctagttttagcataacttggatcttttctatttaaacgatagaaggaatccaaaatagattcaccttcatggtcaggcgaagggattgatctaaataaatcccacaaacattcaaagtgcggctccatttcacgaccgccacgaatgatgtaactttccttttctttattatagatcccatccattgagccaccaggcagacctaattcttcaaaaatgtgaattttcttgcccttcatttggccatcacgaattaaaaagacagcagtagctaatgcagccaagccactaccaacaatataagcagatttttgatcaacatctttaggtttatcagccttaacaaaggcttcataattgccattactataatgcataattgacacttctttcaataatcgttacacttgtaactatttatgcttataaaataatgtaagcggtatcagttgtcaaacattttacatttggggatgatcttgatgaatatgaagagtctgcatacgcagcaacaaattgaacatgcattattcaaattactacaaaaaaagccttatacggagatctctattgcagaaatcacccgtaaggctaaggtatctcgtacttccttttatcgcaattatgaccaaaaagatgaagtcattgcgcaatttttatttaatcaataccataattttatcgctgatattgatcaacataatttgagaacttttaagcagcagcttactgcctaccttgaattcttcaaagataatcctcaactaatgaaattactgcttgatgcaggatttgaaggagaattacttaattttcaaactaaatatttgaaaaagctgatgtcagtttaccattctgatgtccacctacccgactatgcaatagcctatcaatctggtggaatctatatgctgttagtctggtgggttaagcaaaattatcagaccagcttgactgatttaatcacttatgccgaaaaacacattatgctgtaactaaaaaagaagagctcacaaatcgagcttttattttcaaaattattacaatttcttgcattttttaccaaagttaaagtagaaattcattacaaaggcgataattaacaaaatcaatgaaaccaacataatttccttaataccgccgtggaaaatagttctcattgttggcactaagttttgcggcaaactcttggcactttgcgcatcactcaatttattcatcatggtcatcgtgattcccttgtgcgtttgaactccgctggcccagttcagattcataattacgccataaacagcagccattactgtttgagctaaaattctgatcaaatatgaagttgaagtggccgttgccatattctttagtcccgcatcaagttgtacctttaattgcaaagcaacaaagataaagccaaccccaatgccagaaaatgcaccaataaaggtcaacatctgcacaggcgtatgtatgccagaaataaacaaaccagctgatgagataatcatggcaactattccaatcaaaactaatttaaaggttgtcatatgctcctgaatcgctgctacactttgagatgcgataatttcaacaatcgaatttggaattaacgtcatcccaccaattaaagctgacaagcctagtaatgcctgagcccacattggcatataggtgtttactgctaaaaaggcaccccaagtaaaggcaaataataaaaagtcgccatctaaatctttatttttaaataaagaaattggaataattggattgtctgcatgaccttcgcgaataaagaaaaagacgatgaagactaaactaattataatcaatccaattatgatccagctagcggttaaaccaactagttgcacgcccatcaagaataaaagcagtccgattactaataaagtagcaccagggatatcgaaaaccggtgtcttttttggagtaaccggtttgtagtaaattaaacaaatcaaaaatgcaattaagccaattggaatattgatatagaagacccagtgccaagagaaagcatcaattaaccaaccaccaacaagtggccctaagatcgcagccccattccagctggcagttaaatagcctaatactttggttctcgttttaatatttttaaacacataaccagcaatgatataaggtaaagaacccataccacctgcaccgattcccatgataaagcgagagcacagaaagaaaataatatttggcgctatcccttgtagagccgatcccaaaacaaagagtagcaatgaaagctcaaaggctcgtttgttagtgattttctctccgatcttggtccaaatcggaatcgaaatcgacattcctaataagaaaattgccacaatccaacccatgaattgaattccgtgcaaggccgcgacgatggctggaatagcggtattaataatagttccgtctagccccgacatcacgttgccaagcatcaaggctgccgtcaccattgtaatctgttttttattcatgcttaacttctttctatggtatgtaaaaagcgttagacaaaaatttctaacgcttttgagtaaaaaaatatggaggatacagggctcgaacctgtgacctcctgcttgtaaggcagatgctctcccagctgagctaatcctccattatggggcggaatgtgggaatcgaacccacgcatgctggatccacaaaccagtgtgttaaccccttcaccaattccgccatcaacggtccatatgggatttgaacccatgatctcctccgtgacagggaggcgagataaaccactgctccaatggaccaaactagaggaggatgtgggatttgaacccacgcgcggcagaaccgcctaacggttttcaaaaccgtccccttaagccacttgggtaatcctccatagccgaacagatactagtataccaaagtgagaagataacgcaagaccttttttaaaaaaaagcaaaaaaataaagcctttcggcttcattaactatgtaaatttttctggaacagcaaatacttatattctttgccagcaatttcaataaaacgttgggtagcaatattacgccagccaaagtgcttaaagaattcttgtgcatctttatcttcagccagacaccacaagtaaatcttgccatagcccatcttcttcagttcattttctgcggcatttagcaaggtcttacctacattgtagccttgaaaatcaggtttaacatataatgccatcaactcaccgcagccaagcattctagtgtcacgtggacgaccatagctaacggctgcttgaacctcgttattatcgtctttaaaaactaaattatgacgaccactctcattgagtcgttttacccaagcagtagccggaatattatccaaaaatacatctggtagcacgcctttatacgtctcttgccaagttgtttggaaaagcttacttgtttgttttgcttcgtcttcactaattaatggtttaataatcatatttacttcttctttgtcaaaacagtcacagcctctacatgtggcgtttgtgggaacatatcaacaggatcgattcgcttaaattcataaccttgttcttggaacaaaagcaagtcgcgaatcattgttgcaggattgcacgaaatataaacgaccttcttaggtccagtcttaactgtcgcattaataaattcaggtgtcaacccttttctcggtggatcaacaaaaaccacatcggtcttcataccctttttagcccaacgcggcattatttcttcagccttgcctaagtaatactttgcgttttcaataccatttagctcggcattgtccttggcatccttgatcgcatcccggacaacttcgattccacgcacggccttcacatgcttagctacactcaaaccaatcgttccaattcccgaatatgcatcaattactacatcatccgaacctaaatctgcttgcttaatcgctaaatcatacaagcgcggtgtttgcagcgaattaatctggaagaaactttgaggtgaaattctaaactttaaatcaccaatttgatcagtaatctggtcattaccgaaaactaggtaatcctttttacccaaaatcacattggtcttcttaggattatagttcaagactaaacctgaaaccttaggaatctggctaatctcagctgcaacacccatcatttgtgggaaatccttaacccggctgaccaaaatgaccattatctcgccattagccttactacgacgcacatcaagatagcgtataattcccgtattgtttacctcgtcataaggcgcaatcttgtacttgcgcaacacatcacgcactgcaaccaatacacgatcaatttccggatcagtggtaaagaaatttgtcaaaggcactaaatcatgtgaatgtcgtctaaaaaagccaatctcaagctgtccattatattctcgcacaggaacttgggccttgttgcgataccctgtttgctcaggactaggcaaagtttgtcctacttcaatctcatctaaatgtgccttcttaagtaagttaacaacttgattacgcttgaattcaagttgcttatcatacttgatatgagctaaagaagcgagtcccgtttgaacccattgattcaacttgatcttaactcgatcaggactttctttttttatttcttcaattttagccaaagcaaagttcttcttaacctttaaaatctttgcactaaccacttcacctggaagtgcattagtaacaaatacggtcattccctcgtaatgggccacacccattgcttcatacgaaagatcggtaatttctaaatctataatttgattctttttcatactcactcaaccttaaaaaaatagctctctattattataatacttgaccaatctttgtgcttcaaaaaataatcgactgctttttagaaccaactatcacccatatacgcatgcaaaatgtggttagccgctactttcaacctcaaataattaatattattagaaaatagcataatcatacgcttggtcttgtaattcgcaacaaagcagcaattataaccagggatactgccattagcgcgaatgatgtcaccattaaaatacactccaccaaaataagctaccgtctgatgctgggcttggtggtaatactcgtttaccattttaggatttttcagcacatcgttatatacaaacttccaataatcaattggtgacatgaataagttccctgctccaaagtccgacgacgtcgtcactgtcacttggtgccagtcaacatttttactcattggctgagggatctcgttttggttaacctcagaaaaatccttaactttctggagcttaagtggcttagcaaaatcggtctgaatataagcattataacttaaattagtttgtttgctaataatagctgctagcaattcataatcaacatcttggtaatcccaagtatgaagatgatcattctccatgtgattaagcatataagctatttgctctttctgatttttaagcggagaagatggtcgagcattgttaaccaagccactagtatgattcatcagctcacgaattgtaatatctttactacctgaaacttgaggataatagttagataaagaggtattccaacctaataacttttcttgttgcagctgataaattgcagttcctgtcataattttttgtagcgaagcaatcggaaacaattgattagcgttaactatttggcttgaatcagtggtctccttattttggacaacaatcggttgcccctttttatcattaattaacattacaccgttgatatgatgaaacttcatataatcatgcagctgttctttctgattcttaatgccattatccagcttatcccctggctgcacaatgaataaaaatattgcaaaggcacaaagtgccaaaaagatggataaagctcgttttttatgcataaagattcctcttaattactatcccaagcaatgtaataactatatttcctcaattgtaaatctagtatctaaatagattcaactattgtgtgattttatgcaatgaaaaaacatgcttcattagaaacatgttttttcaagtcattttaataaaaacatgaacagcataattaccgcaataaatttcactgctcttatttcatgcactatactaaaaatagcttttctataaatacgtcacattcaaaaagattttgcttaaatctattgacagatatttttaatcttgctatcatattgctcaacaagaaacgaaaagtagcaactttgctcagcgttcagagaactggtggtagctgcaaaccaggcaggcaaagcttgacgaaatacatcgttataatgttgttcggaaaaattcagaaccgttaccatctgatagagattcaagttcttatgcttgaaagagtgggtggtaccacggctattgtcgtcccgttgactaataagtcaacgggattttttatttggaggaatataaaaatgaagaaaaagaaagtttcctttactgaatcaattattatcttaattgcactcctcactattctgggattggcagttatcaagcttgccctttctccagaagtgccagttttattcattgtccttttacttaccttttgggctagactgcgtggcttttcctggcaagatgttcaagatggcatcaaagaaggaattagtgtagccattattccgatttttatctttattttaatcggcgctttgatcgggatctggattaaagcgggaattatcccttccatcatggtcctgggtttccacttaatcagtggtagtttcttcgttccatctgtttttattgtttgttcaattattgggatggcaatcggtagtggttttaccacaatctcaactgttgggattgcgctttttgggatcggaactagtatgaaccttaatcctgccttagttgctggggcaattatctctggagctgtttttggcgataagatgtctcctttatccgattcaaccaacctttcttcagcagttgccgaaagtgaattattcgcccacattaaaaatatgatgtggtcaaccattcctgcttttgtagtttcattaattttattctggatcttaggcaacagtggcaacatggatccaactaagattgaacgtacttcacatattttacaaactaacttcagtatcagctggtgggcaattgtcccaattatcttgatgatcttttgtgcttggcgcaaaatttccgcaatccctacgctctttttaaacattgcgattactgtaatcatgatttttattcaaagtccccacgaatctattcaatcgcttaacaatttagttatgaacggctttgtggctaaaactagtgatgcttctgttaatgccttattaacccgtggtggtatttccaacatgatggctacagtagctttgatcatttctaccttatctttgggtgggatgctcatgaagttcaacattgttcaaagtgcaatggaaccactcgttaaacatttaaccaagcctggtcgtttaattacggtcaccattttatctggtatctgtatcaacctttttgttggtgaacaatacctatcagttatcttacctggtcgtgcatttaagccggcttttgataaaattaagctttcaccattagcccttagccgcgtacttgaagacggcggtagcgtaattaactacttaattccctggggtgttgccggttcattcgccgcttcaactttaggtgtgccagttttacatttcttaccattcgtcttcttcagtcttctttcaccaatcttctctattttgagcggaatcaccggaatcggcttgaagtgggctaaagaaaagtagaaaataatcatatcagtaaaaaagttcctaagaccatcgtctttaggaacttttttacgcaatctactagctaacggttgtgtcatgttgcaaccaattattactcttttcttgacattaccattcgatcattcacagcagctctttttggtatcactttataacctcgtcaaattcacttcaccagccttcatttttgggattgtctttaccgtaattaggaaaaatgaccagcaggcaaaattacctttaaaatcatatttttccgaccagtgggataataacttctttcctacttttgcttggactttattttatctcattgctatgcctaatctgcagcaacacgggcattttcacaatattgccacattcatctggcaattcttcagtgataatgccacacctcatctttggtacagcgtcatgatgctgcaatttttgcttatcatgcctggaatcaaatcagtctgcaactgggtccagcattcttatcgacgactactaatcgcagttattagttccggaattatttactttgcctggttaattttttatgatcacttcattttaaatggtcccgaggctacccattggtatttattagatcgtatctttatcagctttttgatctttgggctctacggtggcttaagctggaattttcatcatgaaattcaaacttttctgtttacatattggtggctaattgtgggattttaccttttaacctattttgggaccagagatttatttttagccactttcaaattaacagacctaaccaacgacagttattacctaccttcaatggcaatttatgctttagcggttatcctcttgatttacctaatctgtattgcacaaaaagtctttaatatgaactactggctaaaatcaattcactttctagctttttatgcttatcgagcatttttagccaatgttttttgggatcgtatcttttggcaatattttaattttaaacagctagctttacaaaatatttatttagctgtcttactactttggatttgtacatggtgtgcttcatatttatctgtttatgtagttcaccacctttggcttaaaattaatggttctgtcggtccatcctaatttgcgcacgtcgatattcctgactgtcacgcgtaggttgagcaactatatctgtaattattatttcatgatcatttcgttcaaagacgattgcttggtctaattccgcatttacttttttattgatagtggtatcttgattaaattttaaatcatccagctcccgatcaataaatgttttttgcgaactcgtcagctgatgatatttttctgccgcttctggagtaaaggacaagatcgtctcccgtctgaattcacctattttatctggatattcacttctttgaccacggatgtcattgtcaatatatcttttttccatcaaaatcacttcctttatatcttcactatacaggaggcgattttctttagacatctttctgcctactttagttttttcataagaaaaactttactattattcatttgaccactaaatacggtaaaatagataagacaagtaaataaaaggagtgtatatttcatggataacttttcaaatactccaggacggcgtcaagtccaggatatttctgcagttaacagcttcttgactaagatgtacagtctcatgattttggctgttttagtttctgcagcaactgcattcttgactacgactgtgtttgcatctgcaattgctaacatgtcacaagccgtttactggatcatcgtatttgttccaattgttttatgtatgacaatcagctttaaggcagcaaagaacccaacattaggcatcgttcttctgttgattctttccgcagtctacggcttcgaatttgcctttatcgcaggagcatttacttccgcttcaatcgctggtgcctttttatcagcagctggcgtgttcgcagcaatggccgtcttcggttctgtaactaagcgcgacttgagcaactggggttcataccttggcgcagctttgatcgggttcttagttgcatggctcgttaacgccttcttcattagaagtggcgctgcaacctttatcttctcctgcatcggtgtgttaatcttcactggcttaactgcctacgacgcacacaatgctaagaagattttcatgacctacggcggtcaagtttcagatactggtttagccgttatgggggctttaagcatgtatctcgacttcatcaacatcttcatgttcttgctacaaatctttggcatgggcggagatcgcgattaattaatttccatacaaacatagcgttgattagcttttacactagtcaacgctatttgttttgcttaaattttatccaccaacataaaattcgatatgttgttgtaaattgttgaattcaactggacaataaccaccaatttcgccatcaaggttaactggcaaatcttgtccttcacttttaccaatcaattccgccttcaagctgcgggtcttggtataaatgatatttggatcatcaacgtgcttaccattcaaagccaatgccatcaacttcatcatgctaacagggtcagaaggcttgaccacgatcaattggaataatccatcactaagctgtgcatcaggcataacttgctcaaaaccaccaattgaattagtcattcctagtaggaacattgataattttccttcataaacgccatcatcataagtcaaacgcatctcattctcagtcaagtgtggcaacatttctgcccccttgattaagtatgcggcataacccaaagctgacttaacctcagatggtacgccatatgttaactcagttaaagaaccgctggcagcaatattaacaaaatattgaacctggtcaccaaaaacagctttaccgatatccattttacgagttttattctttaagattactttagcagcatctggaatattatcacgtggaatggctaatgcacgagcataatcattagtagtaccagcaggaataattgccattttaggcctgttttctaaaaaggcaatcccgttaactacttcattgattgtaccgtccccgccagctgctacgattaaatcaaaaccttccttagcagcacgagtagcttcattgcgagcactattttctttaggtgtagttctaaaagcactagcttcgtagcctgcttgttctaatacatctaaaatatcggccacattctttggcatctgttcgtgacctgatacaggattataaattaatcttgcttttctagtcataattactacctaacgttctaaaaattaacgactttgcaattcttggttaagtaacttgttaaccatcttagggttagccttaccacgagtttgcttcatgatttgaccaactaagaagccgattgcacgatccttaccattcttaaagtcttcaactgattgagggttatcatcaacaaccttcttaaccattggagctaaaacagaagtatctgacaattgaaccataccattatcttcaacatacttcttaggatcagtaccattttcaatggtttcagcgaagaccttcttagcaatcttagatgaaatagtaccatccttaattaacttgatcatttctgccaagtgttcaggcgttaacttaatatccttcaattcaacacggtgatcgttcaagtaaccattaacttgtgtgttcatccagttagctgccagagttggatctgcacctgccgcaacagcttcatcaaagaagtcagaactttccttagtttgaagcaaaacgttagcgtcatatggcttcaaaccatatttatttacatagtcatcgtaacgagcaaatggcccctttggtaattccttagcaatttcatcgatccattcttgtgaaatatgatctggtgcaatatctggttctgggaagtaacggtaatccgatgcaccttccttaacacgttccaaaacagtcttaccagttgcttcatcaaaacgacgagttgaaagttggatgtgaccaccagccaaaagaacttgttcttgacgcttttcttcatatgcaagtgaacgacgtacgtgatcaaatgagttcaagttcttcatttcaaccttagtaccaagttccttttgacctgcaggacggatagaaatgttggtatcaacacgcattgaaccttcttccatcttaacgtctgaagcaccagtaaattgaacaatcttacgtaatttttcaaggtatgcgtaagcttcttcggggtcttccatgtcaggttcagaaacaacttcaagcagtggaacaccttgacggttcaagtcaacgtatgagaaaccgttggttccgtgagtgttcttaccggcatcttcttcgatgtgcatttcgtggataccgattctcttcttcttaccgcgaacttcaacttcgatgtaaccatcacgagcaagtggttggaagaactgagtaatctggtaagccttggggttatcaggatagaagtagttcttacgatcaaaatgagtagttggcaaaatgtgagcgtgggttgctaaggcaaccataatacctaaacggtaaacattcttgttaaccattggcaaggtaccaggcatagcccagtcaataacattagtctccgtgttttgttcagcaccataggttactggtgaaggagagaaaatcttgctctttgtctttaattcgaagtggacttcaagtccgatagtcgatttaaaattcattcaattagtcctccattccagttggtgttttttcataaaacttgttagtgcgttcgataaagtcagcagtcttgaagacattaccttcatcaaaacgcttagccataacttgtaaaccgacaggcatcccatcaactaaaccagctggaacactagctgcaggaatacctgctaagttggcagaaatagttaaaatatcattgttgtacatcttaattgggtctgaaacttcttcgccaataccaaatgctggctcagtagtagttggtccaacaattacatcattttctgcaaagatcttgtcaaagtcatcacagatcaaggttctaaccttagcagcttgtctaaagaaacggtcatatgaaccagctgaaagggcaaatgaaccaagcataattctacgcttaacttcagcaccaaagccttcagaacgtgatttaacgtaaacatcaagtaagttcttagtgtccttagcacggtagccgtaacgaataccatcgtatctttgcaagtttgaagaagcttcacttgaagcaatgatgtagtagtcaggaacaacgtatttagtatgtggcaatgaaacctcattgatcactgcaccagcatccttcaaagcatcgatttgcttttgaataacttcacgcatttcgccgctaactgcttccatgtattccttaggaacagctacacggagacccttaacatcttgaccgataaacttggtaaagtcaggtacttcacgggttgaaacagttgagtcatgctcatctgcaccagcaattacgtttaatacttcagctgaatccttaacgcgcttagtcattacaccaatttgatcaagtgaagaaccaaatgcgataagaccccaacgtgatacacgaccgtaagttggcttaataccaaaaataccgttaaatgcggctggttgacgaattgaaccaccagtatctgaaccaagtgctgctacaacttgaccactagcaactgcagctgctgaaccaccagatgaaccaccaggaactttatctaaattccatgggttgtgagtagcaccataatatgagtgttcagttgatgaacccatggcaaattcatccatgttggttttacctacaaaggttgcaccagcttttttaagcttagaaataactgttgcatcatacattggcatgtagttgtacaaaatgtgactagcagcagttgtcttaatcccgttagtgatgatgttatccttaattgcgattggaatacctgctaacttactcttggagtagtcaaggttatctgcaggcttagcatcatctaaaacagtgatccaagcatttaacttcttatctgtatccttaatgtttgccacagtgtctttagctaacttatctgctgacaagtcaccgctggcaagctttttgtttaatgaatcaatattttcgtttaagtaattcattactcgtcctcatccttattaataattacaggaaccttaatgtagccgtttgccttttcaggaacgttagccatcaatgtttctctgtcttgtccttgccagtgttcaggtttatcttctctgaagacagtatcacgatcaacaacttgaactgtttcatcaacaccctcagtatcaacttcactaagttgatcagccatattgataattgatcccatttgatcagtaaatttatctaattcttcttcattaaacgcaagtcgcgaaagagtcgcaacgtgtttaatggtatcttttgtgatttccacgcaaatacctcctattcgccgccataaacatggacttgataatcactatcgccggtttcttttgcaactaaagcttgtacatcatctactgaaccaattttgatttcaattgggatattgccagacaagtactttttagctgacgacaaaaccaaacgggtaaaactttgaatttgttcatagccataaaattgcgttgttacggaaatgttttcttgtgaaagcttaccgtttgtataacgcaaagttgccgttaccccactaatattagggaagtagttttgaatagccgtcttgaaatcattgaagtgcgatgcatcatcactgttaattgctttttcactaccagttgtcggtaaaacttgcattttttccgacatggatttccatttagatattttactactattagcggccgctgtcccgtaagcgaagtaagttccaccaactaatgaatcttttccagtcttggagaataaaccaatcgtaatcggaatattctttaaagctttcttcttacgcaagcgagcaacaatttcattagctattttttcaccttgagctttttgttcagcacgtgaaatagtagtttgaaattctgcaccgttacgctttttctgataataatcaaccgaattcatggctaagcccaagctcataccacctaaattatacttggaaccagatccagtcaaataatcttgttcgataatttcttccaaataaattggattacgcgtatcggttccggtcttaccattatttactgggtttaaaccatcaggatttgatttggatttacgcattaaccaatcagttacagttgaggtatccaaatattgtccttcttggaagacgtattgattaggcgaaaattgattcttagaaatttgaatcagccctcgctctaattcacgcgtatcaacagaattatcattatcagtagctgttaatcctgcaatcggactaatattatagcgaccatttttcattaaaacggtatagccattcgttcccgtgttagtagtttgatagctttttttcttagtggttgaagtggttgtcgcattatttgctaaactagaatccttcaacttaccacaaccacttagagtaagcgcgattccagctaaagccattacttgcaaatattttttcacaataattgtcctttattcaatttgtgcaattgcttcttcttcagtcaaaagtggtacgcctaaagtctgcgctttagtatacttagaaccagcatctttgccataaatcacgtaatcggtcttatgcgaaactgaacccgtaactttggcacctaaagcttgtaattttttcgtaaactcacttctagtataatgctctaatttacctgttagcactacagtcttatccttaaatggattatcttcaatttctgcaggctcatctgcacctaagtaatccatattcaggccgctctcacgcagctcatcaattaccttctgtgcttctggttgagcaaaatatgttgtcattgattccgcgatcgtcatgcctattgtatcgatagaagctatttcttgcacgtctagagacataatctttgccagatttttaaacttttgagcaattaagcgtgctgctttggccccaacatggtcaattcccaatccagtaatcaataattcaactgagttttgctttgaattgtctaaggcagttaacaaattattgatcgatttttccttaaaatgatcgagttgtgctaaatcatctgcagttaagtgataaagatcagccacattatgcactaaatctttagcaatcaattgtttaacgatctttggccccaaaccggcaatgttcatagctggtcgagaagcaaagtgcgtaataccctcctcaacttgagctggacaagatggattgatgcagcgcaaagctacttcatcttctaggtgaactaatttttgcccacaggatggacaagtcgttggaatctgataagctacagaatctgccggtcttttagccatgacgacttcagagatttctggaataatatcgcctgctttatgcagtttaacggtatcaccaatcctgacgcccttttcattcaaataatctgggttgtgcaatgaagccctagctacagttgtaccagctagttgcaccggatccatgaccgcagttggagtaactactccggtacggccgacagtccaaacgatatcccgcactacagtttcttgttcttcaggtggaaatttataagcaatttcccagcgaggcaccttaacagtgttaccgagctcttgttcaattcctagatcatcaatttttaacacaatgccatcaataccatatgttaggctgtttcgtttagctgtgtattcatcgataaaggcaaaaacttcatctaatgtttttaacttacgaccggtttcattggtatgaaagcctaaatcatgcattttttgaattgcttggtgctgactagtaatttcttcaggcggattaacccaagtataaataaaggtactaagttgacgcttcttggtaactttaggatcaagttgacgcaaagaacccgctgcagcattacgtggattagcaaaaactactagaccttgctcttctctttctgcattcaacttggcaaaggcttccttgcccatgtaacattcaccgcgcacttcagttgttaacggttcaggcaaagtctgtggaatatcactaatatacttagcattagctgttacatcttcaccaacataaccgttaccccgcgttgaggcacgaaccaacttaccattttcatattcaagcgatagtgataagccatcgatctttaattccacgttatattcaactggatgaccaactaatttttgcatccgttgatcaaaatccttcagttcagctttggaaaagacgtcccccattgacagcattggaatcgggtgctctaccttggtaaaatcactatcaatctgtcccccaactctttgggtaatggagtcgggtgtcacaatctctggaaattctttttctaattcaagcaagcggttgtagctttggtcgtaaacattgtcttcaacctcaggcgcgtccttagagtaataggcctcagcccattcattaagctgttttctaagtgaagccgcttcttttttagcttcatcaagagtaatttctgccatttttccctcctgatccaaatcaatctttctttaattatatcttcttaattggcgcaaaggcagccaaaagccgtttgattcctttaccagggaaagcaatatccagctccatatcttcaccagtgccattaactttagttacaacaccatgtccccaagctttatgctcgacttggtcgcctacattccagcccttcttttcagcaccgacagcgcctgaagctttcttagcagtataaacttcagcgcgagctcgttcggctttgcgagcaaatggtgccgtctgtttctcaaagctagattggataaagctgctttgtaatttttcattttcttctttgtgcagatcctgttcatcaatttcgtccaagaatcttgaaggcggattattttgcattctgccatacatcatccgtgagtaagcattagttaaaaacagttcttgcttagcccgagtaattcccacgtaagctaggcgccgctcttcttctaattcattgtcatccatcattgcacgttgcaacgggaaaagcccatcttccatgccaattaagaaaaccactgggaattctagtcccttagctgcatgtaaagtcattaaagctacttgattgtcatcttcatcaagatcatcttgatcgctaagtagagatacttcagccaagaagtcgcttaatggattagactcatcttcttcgggctcataatgatcatcaaaacgcttagtaactgacaagaattcatccaagttttctaaacgcgtttctgattcaattgtattttcagctcgcaaggcatcggtataatcaaaatcagctaagattttttcggttaaaccggttactgtaccattttgagcataagcaattgcatcacgtaatttagtaccaaaatcgcttaatttcttggctgctctagtattaattgaactttcagccacatgtcccatcgcatccaaaatgttgtagtgattctcatccgcaaatgttaacaacttatccacagtagcggcaccaattccccgctttggagtattaataattcggttcatactcatcgtatcagctggattagcaactaacttcaagtaagccatcacatctttaatttctttgcggtcatagaatttatgtccaccaacgatttgataaggaatattgcttttaacgaaagcttcttcgactgttctagactgagcattagtccgataaagaattgcgaaatctttgtaagcccgttttttatctttaacttcttcttggatctttgaaatgatgtagtgagcttcatcatcaccgctttgggcttgatagtaggttaccttttgcccatcaccttgatcagtccacaagttcttagccttccggttctggttatttttgatgaccgagttagctgcggacaaaatgtgaccagtagaccggtaattttgttctagcttcacagtcttaacatcatatttcttgtaatcctgctcaaaattcatgatgttttccatattagcaccgcgccagccatagattgactgatcggcatccccaactacacaaatattcttgtattgtgcagccaaagcatgacagagttcatattgagcctggttagtatcctgatactcgtcaactaaaagataacggaacttgttttgataatagtgcaaaacttcgctatcttttttaaacaaaactagggtctgcataatcaaatcatcaaagtccataatttgatcacggcgcaatctacgttgatattcttcatacaccttagccgccatcttctcaaatggtgacaatgcactctgcataaaagcttcaggatccagcaagtcattcttgccattagaaatcgcggctaaaataccgcgtggatcatacatcttaggattgatattcaagtctttttcaatatgcttaaccaaagttaattgctcggccgaatcagcaattgaaaaattatgaccataaccaatcttatctgcatcccgacgcaagatccgcacacacaaagcgtggaaagtcgacatccaaatgtcgttagctgctggtcccagcaacttttgttcacgctcacgcatttcactagccgccttattggtgaaggtaatggctaaaatattccaaggtgcaacatgattttcttcaactaaataggcaattcgtctcgttaaaacagaagtcttacctgaacccgcaccagcaacgactaataaaggtccttcagtggtttctaccgcttctttttgttgcggattcagaccagctaagatagatttttcgctcattattttccccttcactaaaaattatttcattaatgcaacttgaatattataccaaaaaagcagcgactaattcgctgctttagatttacttatcatatttttcaagatcaaactgttcaatcaaattaatcagcttatcggcatagtccggatcagtcgcatagccgtcggtaaccaaggctttagcttgtgtcttataatctttggatgctagaacatgcttatactgatcgtggttccacgttgtcccattctggaataatctagcgtgagcccgaatagaagcctcatatgagtcatatatttggaaacgcgccttcacggtaacccacttattctttacatattccttagttgtcatcactgccgaagtgttcgggttggatcctttaacaccaaaaagattgttgtatttttgcgacaaatcactttgtccataattactttctaggcaggcttgagcaatcgtgatgcttggcaataagtcatacgacttgtccacttcgcgcgcaatcggaccaatttttttgataaagtcttttttctgttttaatagttttgctgcttcctgttctttttgcagctgtgcttgttgaatctgctctgattgaatcgcgtaacgcctataatatctaaagccgacaaaagcaaccatcagaataaatagaattacgaatacacgcacaacggttttgacactttttggtactcttgatttacgttttcttgccatagttttattccctttaattactaattaaagtataaccgatttttgagtaaaaaaaaagaagtcgctcactgcgactcctcaatcagtgcgggcgagaagactcgaacttccacgatctaaagcgatcacaagatccttagtcttgcgcgtctgccattccgccacgcccgcggcacatcaactataatagcctaaatacagttgagatgcaagaaaaaatataaattattttaaatttctgatcattttacgcaaaagtttgcgctaaacgcaggtgtcccctacatttaccacaacgatacttttgtgtattaatcctgcgcattcttgggtatctcaacccacagttttcacaaagatataggtaacgatattttttctttttacgtaagccaatatcaggtgcataacgactgcctccaacttttttcagcaagattttaaaattgcgatcacggtgtcggtaacccaagcccaataaatgcaaatgatagtgggttaattcatgcttaatgattcctactagataatcatgatattgtggtactaaaaaatgcgcgttgatttcaagatggtgatcatccaaatgataacgcccacctgttgtggtcattcgccgattaatttttacaaggtgcttaaaagggcgatcaaaatattttaacgaaattttttcaactaaattttgtaattcattctcattcatggataaaattttattccaaaaataaaaatcagcaagaatttaatctcgctgattttttgctacctaaatatcttggcatacatccccgcctgcttaggcgtactaatgtgtcgtttcaagaaagttactaagtcatgtttgaatgactttttaccatccatccaggttccagtgaataagtgaatcgatttggagtccttagaaggattacacagaactccatctgaatagacatgaatgccatcttttaacacttgctcctgattacctagctttaagccatacttatttaccagcatttcagtaacggaaatactatttactcccgccatctgattcttggtgtcatattcaaaatcacgatcttgataataatccaaaatatcctgcataaatgggtggcctttttctgcaccaaaaattgcagctgacagataatcatggttttcaaaaccaataaaggcagaagcattcaaaagactatctaacttatccacgactctaacatcagtatctaaatatatcccaccttgttcataaatagcccgtgctcgaacatagtctgacacgaaggcccatttttttgcagcataagcttgttcaatataacgattctcatgcatatcaaaattatcttcattccactcaataatttgataatcaggcaattttttcttccaggttgcaatacattcttcaattatcggggatttaggattgtgtcctacccaaacataatgaatttttttaggaatcatttttaacctcgcttcaaaaagttcttaattagcttcacaatatcatcattaaaatcaagcttgaacaagaacatcaatgtcagataaataattaacatgacaattgacttaaaagccatatcgaaaaaggcagatggaattatattaggcataaacattccaatagccaaggttagcaccgcaattaacaaatacttgggcacgtcatggaaaacataactaaattcatagccatcacgtacaacccagagccgcaaaattaaaactactgcttcagtaattaatattgcaatcatagccccacctgcgccatatggcctatctaagagataactcaagacaatttctaaaattgccccaataactactggcacagcataatccttgtctcgctggttagccaaagcaaattggttagcaaataccccgccagtcggaatcatgataattgttaaggtaaaccaaaacattaatggagtcatcggaacatatttattcccaaagaaaaatggtacaaactgtttggtatttgccataataattacggcgaacaaggtacccagcattacagtagcttccagtgattttttcatcactatcttttgtgccttttttccttcgctcgccatcttaggcataatgactagcgaaatactggtaattacacccagaatcatatttgaaattcgttgtgaattgtcataaaaagaaacctgagtcgaattagaaaaccaacccaaaattggtttatccagcgaagtataaatttgagtcgcaatctgtggaatcatcaaagtaccaattgcaattgccgtctgtttaaatttgtaaaaatgagcaatgggttttcctacatagcgccaaatatcaaaccaaaagacaaaggaacctagcattgtcgacactgacatgatcaataaatatttccacaagtcagcgggtgattttacccataataaaattagaaccacactaactaactttaccgccgtgtttttcaaaacaacacgaccaaagtcagctagtccttgaaagaaccatgaaatatcaacctgtgctgagatcaagtatggcaccatcaacaagatataaaaccaatattgaacgtgaaatacagtcgctacaaaaaccgtgactaaaatggtgataataccggcgattccttggaaataccataacccccagaaagcattggttagctcctgcggtgtaccataagtgcgcgtccgtgaaattgttcgcatccctacatacgacacagacagaatacaaaaaatcatcaagaattgcaccgtattgttcacactgctataaatcccataagtcttaggacctaagacacgcgataaatacggtacagtaatcagtggcaccaatacaataaaaatctgataaaccgcattatataagatgtttaaaaatgttttacgcattttaacctcgatattcctgcgtcatgtacttaaagacgttctcacaatatgaatcaccatgcacctggttagtcaaatgtagccagtaaagacggcgattagcaatctgctggttatcaagttgatccagattgcgaattagttcatcctctgaattaacacagattccgggagtaatctcagcatatggtcccattagtaatccgcgcgttttttcatattgctctaaaaagttagtcacaaacacaatcggtttgttcaagtgcaagtaatcaaagtagattgacgaaaagtctgtcatcaagaaatcagtatcaccgagcaattcgtacaaatcataattgtggtcaaacaagtaatcattgttcatgaaagcaatgttagaataactgctcttgaaattggcaaataaacgcatttcatagggatgcaattttacaatcagatattgatgccgcttctttaattctgtatttaatttttcaacatcaaaatcccgaaaggcaaaaaagtttctctctttgattttctccataatggatttatcttccaattcataacgaaaagttggcatatagatcccgatctgtgcctgatcgtcctcagttttaaataagtcagccaacaattgtttcttcgaaattaccggcttagccaataaatccaaacgcggaaagcccagcttgcggtatttttttgtctcaattgccatacaagcactcattagtgattcatatagatcagagctagaagcaacaatatccgcattcttgtgccacaatttttcgttacggcgattgtcgcgtcgcttagtattattagccataattcccatgcgcttgagtggaacgccatgccacaactggacattaatttgatgcttgcgcaccttaaatggttggtgcgttgtaattacatatcgcgctgctccgattttctgccaggttttccacttcaagtgtgacgatggccacggctcaactaatgtaacgttatattcaggatgattcaattgcagccacttgtaaaaagcatagccgttagatccagacctacctgaaccattcaggataaccacattattgttttccatcgtggtaaatctagccaaaaaactcatccaagccaaataaagacggaataaaaagcttttcattaaaatacttccttaaaatagtctaatacctaaagcatataaaaaaagcttgagcaaactcaagcttttttctttatttttgttaaactttattctttacccatttttctctggcagaatttaacaatttcaacaatcaaaaccatcaaaattccggcaattaaaatgactaaccactgtggtccatcaagttcagtcacatcaaagaacttagtcataaatggcaattctaccgctgccataattacagcagcaatgataattgcaccattgaaccacttgttagaaaaagtatgcggtctaaaaatcgactgatgtacatacttggaattaattgcatggaacagctgaatcaagcccaaagtcaagaaggccattgtcaatgcatccccatgttgcaacgatggatcacccacatgtggaccgacatgcaaaccaatttggtatgcacctaaaactaaaattccttccaaaattccttggtaaataattgaactggcaacaccaccgctaaagaagttagacttcttaccacgcggcttgcgcttcataattccaacttccactggttcaacacctaaagcaatagctggcaaagtatccgttaccaagttgatccacaagagctgcacaggagctaagatatcccaacctagcattgtcatcatgaaaactgttaatacttcacccacgttacaactcattaaatatagaatggccttttggatattactgaagaccttgcgtccttgctttactgcttcaacgatcgtggcaaagttatcatcagccaaaaccatatcgctggctcctttagaaacttcggtcccagtaattcccatgccgattccgatatcagcttgcttcaaacttggagcatcgtttaccccatcaccagtcattgcaacaatcttgtcattagcctgccaagccttgacaattctaaccttgtgctctggtgaaacacgagcgtaaacgctgtagtcaccaacatgctgtttgaaatattcatcatctagtttatcaagttcagccccagttaaaacgcggctatcctgacctttttcaataatacctaggcgttccgcaattgcttgagcagttgtttggtgatcaccagtaatcattactgttctaataccagcactctttgcttcagccacggccgctttagcttcaccacgttctggatcaatcattccgactaacccagcaaaaattaaatcttgttcaacattatcagttgttggatcggtgtacaattggtcgactttcttataagcaagccctaagacacgtaaagcttgttgcgccatctgcttgttttgcgctaaaatattttgcttctgcttatctgtgatcggctctacttgaccaccattttcaatcctagttactcgctgtaacaacatatctggtgcgcctttgaccgctacaaagtattgctcgccatctttattaacagtactcatcaatttccgttctgaatcaaaaggcacttcttgaatccgtttgtatttttcaagcaagtcagttacatcaatgttttgatcaaaagcaaattgaatcagggcggtctctgttgggtcacccaataagtctccgccattttcaatcttagtatcattagccaaagtcattgccaataaagctgggttattttcgctaatactttcactattatcatgtaactttttatcatagaagaccttttcaactgtcatccggttctgggtcaacgtaccagtcttatcagaacaaataatgtctgtagcacccaatgtctcaacagcaggcaatttacggacaatcgccttatgtttggccatcgtttgcgtacctagtgccaaaataatcgttacaattgctggcaagccttccggaattgcagctacagccaaggaaacggcaaccaagaacatgttaatcattaaagtagagttacgctctgctgaatcagccttgagcactcctacgataaagacaataacgcagattgccaaaatcatgatggttagggtctttcccagttgattcaagtttcgctttaacggtgtatcagtttcatcagcattgttcaacattgtagcgattttaccaacttcggtgtgcattcccgtactagttacgattccttcaccacgaccataggtcacattagtattggaataagccatatttacgcggtcagctaaagcaatgtcttcaccttctaaagtttctgcatgcttttcaactggaactgattcaccggttaacgctgattcctcaatcttcaagctgtgggcttgattcaagcgtaagtcagcaggaaccacatccccagcttctagtaaaactacatctccaggaaccaattctgtgcttggaatagtaacgattgtatcatcacggcgcacatgcgcatccggcgtagccatttccttcaaagcatcaatcgcagcttcggaacgtgcttcttgaaagacacctaaaattgcgttcaaaatgaccacaatcataataattgcggcatcagtccactcatgagctaataccccagacaaaatcgcggcaatgatcaaaacaataatcataaagtctttgaattgatcaataaaacgcatgaacatgctttgctttttcttggaagctaaggctttcggaccatattgctctaatctagctttggcatcactagcacttaacccatccttaacggacgtgttaagatctttttcaatgtcggggatcgactcgacataatattttttcgccattttccctctgctatataaaacatagaaacatgcagaagtttgatattttccacataccagaaaaaaatatatttttcctttcctaattttatttactgtcgtcatcattggtattccgatattccatctggggagtaatcgcattgaccaactcctgcagcttaagggcttagccagccccattattttttattttgttaatgccaataaatttaatactgcattgtcatcacgatcattgctatagccacactcataacaaacatattcattgtgcttggtgccatgttttctattgccctgcaaagtgattttgtctgcaccatttttgacatagccgcaactggcacatctttgcgttgacgggtagcttctatcagccaaaattagctctttatcataccaagcacatttataggataatatctgtctaaatttgccaaacaaggacctctgtatgcctttggaagccacatgcgtcatcatcatttgcttgacattcaagtcttcaatgacgatttggtcataattatttgccagctcagtagtaaatttttgcaaaagatcattctgaatattgacagccctgcgataatcacgctgaagcttggttctcacttgcacgtaattattgcttcggccagccaattttccattaacccttcttttcttggccaatattctctgataatgcttgatccgcttgtacagtttctgcagtcttgccggcaaaatattgattctgccctcagtatagctgaagtgcccaacgttgacatcgatggcggtctttttgccagttttaacctttattccagctttttcttcgtaggaaagagcagcgtaataatggcctctttctctaaagatgctggcaattttaacctgtttcatcctcaatgcttcatatgttggaatatcaaaccatgatttaattcctctgggcttatccagtctgagcttgccattaataactttagctcggtcagtcttaaaaccttgacgtggagctttctttgacttgaaatgcggcttgccccagtcgagctgggctttgtcaaaaaagctcttccaagcgttggccaagtccttgactgccaactgcagacaacgagcagacaaggtaaactgccaatcagccttgttattgactaattcatctcgcacccgacactcattaggactaggattattatccttatttaaagtccgtgcttcatacatatcttgccaggtttctaaggctagattccagcagtatctgcggtaatcgcatagacggtcaagttctctttgcatggtcttgtttggttttagctcagctacctgtgttttaatcatttatttcacctccaatgcaaacataagtttagcaaaggatgaaacaaaaacaagcgaacaaaatattaaatttttagcagcagctaatttgtttctatgttttatcttcctgatcaaattaactgcatctttttctatttattgctatcaaatcctatcttttagtcaatcattatttcctcctcaaaaataaaaaagagacttacatgcttgtagcacataagtctcacgaattaagataaatccagaagtatcttacttcggctgttggattcatcgcaagcaattgctgttactcccttatgacaagttaattataagcaaaattttagctatctacaagttttagcgaattgcttttactttttataaaagtcatcaaagacagtaactggcaaatgacgcttgtgtttactcttattccataatttttcaatttgatcagctgttttatctgatacttccttaccttcaaggtaatcatcaatctcttggtaagttacaccgagggcaacttcatctggcaaatctggcttttcttcttcaaggtctgcggttggagccttttcatataaatgcttaggacaacctaattccttaagcaaagccttgccttgacgcttgtccaaacggaacaatggcgtcaaatcagcggcaccatcaccaaacttagtgtaaaagccactaaagttttctgcagcatggtcggtaccaacaacggcacccttattagcaccagcgatggcatattgaactaccattctttgccgcgccttaatattgcctttgttaaagtcagtaatcttttgaccagttgcttctacaaccttcaccatagcatcaactggttccttaatattaacaattaaatcctgatctggcttttgaaaagcgactgcatctgcagcatcttgggcatctgcttgaacgccataaggcaaacgaacagcgataaattgataagaatcatcgccagtttcctcacgcatttcttcaattgccatttgacacaatttaccagtcaaagtggaatcttgaccaccagaaatacctaagacgtatgacttaagaaatggattagcctttaaataatctttcaaaaaatcaattgaacgtctaatttcttttttagggtcaatttctggtaaaacatgttcataagcgataatttctttttgtaattctctcatcgaccaatgcttctttctctaattttacgccgaatgtcttgaatcaaatccatcttggattcgtataagttttgtgataaatccactggatattcctgcggattcaggctacgcttatattcatcccataaaccatcaaggttgtcagcacagaattttttaatttcatcaagactaggttgatcataaactaattttccatctttaaaaatatcatgtaaaagtggaatagcagtgtaatcagttaccaccttattaatatagttatattgtgggtggaacatgaagagcgcgtcaaatttgcgtggatcttcattataccgagatacccagtcaccttcatttttcttagcagtgtttgcgctaatccgccatacttgttttttacctggggtggaaactttgatggcatttgaagaaatcttcaatgtatcccgcatggcgcctaattcatcttccatggcaaccaacttgtaaacagcaccaagggctggttgatcataagcagtgatatacttggtcccaatgccccagacatcaattttagcgccttgcatctttaagttagtaatggtgttttcatcaaggtcatttgaagcaaaaatcttggcatctggatagccagcatcgtctaactccttacgaacttgcttagaaatgtaagccatgtccccagagtcaattcgtacgcccaagaagttaatcttgtcgcccatttcattagccaccttgatagcattaggcacaccactacggacagtatcgtaagtgtcaaccaaaaaaacacaattcttatgtgtttccgcatatgccttaaatgcgtcatattcactgccaaatgcttcaactaaagcatgagcatgagtccctgaaataggaataccaaacaatttaccagcacgaacattactagttgaatcaaagccgccaatataagcagctcgagcaccccaaatggccgcatcggtttcttgcgcacgacgagagccaaactccattagaccatcatctttaacagctaacttgattctagcagctttagttgccaataaagtttggaagttaataatatttaaaatagcagtttcaactaactgacactgggcaagtggaccttcaacttgcaaaattggctcgttagcaaaaaccagctcgccttccttcattgaacgaatagtgagctttaattttagattgcgtaaataatcaataaagtcatcatcgtaaccttcattttctttcaaatattgcaggtcactttcggtaaactttaaattctttaaatagttaatgatgtgttccaaaccagcataaacagcataaccgttgccgaatggttccctgcggtaaaaactttcaaaaacggcattgcgatcagcaatccctttcttgaaataggtatacatcatattaatttcgtataaatcagtgtgtaaagccaacgaatcgtctttggctaattctggataaaacattgcttctctttctgtcattaaaaattaacaatttcgtttttcattatacagccattacagtccattggctattctcaaaactatttttacctcaaaattagatacactttttcaattgagtccagttgatttttaatagaaaaatgctcttccgcataccgcttttctgtattagccatctggcgtaactcttcatgggttttattaacggccagattaatctctttagcaattgaatcaatgtctcccgttttagcaatgaaaccatattcgggtcctggaatcattttatgaatatcacctacatctgtggacaaaatagggattaaattgtctgttgcctctaaaagcacaagtggaaaactctctgaatatgaagttaagacggctagatcaattcgcttatataatccgctcaattggtgttgagtcataaaaccgtgaaaagttacttgtggtgccatgtccaattgccgcgtcaaggccttcaatgcttcaagctgactaccatcacccgcgatatgcagacgaatatgctgatcatctaattttttcacagcttttaagagcaattcttgtcctttaaccttttccgtacgagcaacgttaataatattaaaataggtatgttcatatttagctggaatttcactatcactgtggaaaaagatgccattatagatgacatgtaccttgtttttatccacatgtgcgcgattaattagtagcttggcaaaacgctgagttactacgaaaatacaatcagcttttctcaacgcacgtaaattaagtttagtaaaaatattgccaatgattcccctaccttcaaagtctagataaggatctgaatgtacagtaatacaccaagttgcacgaattcgcttgtgaatcaaagataaaaataagttggcacgcgcaccatgagtatgcacaatatcatagtgcccctcattgataaacttagtcagtctacctaaactgcctaagtcataacgactattagctcctagcacatgtgtagtaatcccagccgctcttgctgcttgtgctactggtccttctgccagcgttaataattcaaaatctttgccttcatttttggcttcagttagcaaattaacaatatgtgataaaccgccgccattttctaaaccagcatttacatgcaaaaccttcatcttagtaaaattattttcccttcttttttgactgtttaactcgcacaacaaactgtggcaaaactaacatccgcttaaatctgctaggattagtaatcaagcgataaaaccactctaaatgcgtcttttgaaaagcttctggtgctcttttaacgatacctgaaaagacatcaaaactgccacccacacccatcatcaaagctggtgtttcgttcttacgtaagattgataatagtttttcttgcttaggaaaacctaatgctgcaaaaaccatatcgggttgtgccttctgaatgcgccgtgccactagttccaaatcttcagtaaagtagccgtcttctgcaccaactagattaatatttgagtattccttagcaattttgctttgtactgcatgaattacttgtggcttagctccaattaagtaaactcggctaccacgatcgctagcaacatccatcagccaagtaaacaaatcatatccagtcacccgctcaggtaacggctgcttaagcattttagctgcttttacaatgccaatcccgtcagcagtaatataatcgggatcattttttagaattttcataaattcaggattctcgtttgccgccatcacaatctccggattagcggtcacaataaaggtcgacaggtgattatttagtcgattaataaattcattttggaattggttaaaagttttattatcaaaatcaacacctaaaatattaactttgctcattttcacacctcatgcgttttcttatctagtttctattctaccattccgacacgcaagtacgagaaacatgttcaagttttatattttattcaaacatgataagattgttttaataaaggagaaaaaatgaaaagagttattacctatggcacctttgacctacttcactacggtcacgtgcgactgcttaaaagagctaaagaattgggcgactatttaatagtaggtttatctaccgatgaatttaatgaattcaaaaaacacaaggaagcctacaatacctaccctgaacgtaaatacattttggaagctatccgttatgtcgaccaagtcatccccgaaaaggattgggatcaaaaaatcaccgatgtacaaaaataccatatcgacacttttgtcatgggcgatgattggaaaggaaaattcgacttccttaagccttattgtgatgtggtttacctgccaagaacgccaggaatttccactactaaaattaaagaagatcttaaataaaaaaatactccaattccattcaatttgaatgagattggagtttttgtttacttagaaaaagtgaattcaaatcgttctgcaacgtaacgtgcgcgggtgtattcgaatggttgcccatctgctagttcagttacctgtcgtctagtaattaacggttcaccttttttagctttaagaagacgcgcatcttgctcgttggcaattgatgcagaaatatgttccgtcactcgtccaatggcaaaaccaccgcgcttttctaaggttttatataagtgcgttgaaacatcttctttagaaaaattctttactaagtagtatggcaccgttacgacttcataacaaattggtgtcttatcagcgtagcgaatccgctccatccgcaaaacgttctcattatcttttagcgcaagacgctctttttcagataaagatggattgccaatctgataagaaattaacttacttgaaggaacttgaccattagccttagtaatctcagtaaaggacataattcctgacattttttcttgaaccttttgactagctacataggttccgctacccaagcgccgttctaaaattccttcatcttctaatgttttaatcgcttggcgtaaagtcattctcgaaacgccaaacttaactgccaattgacgttctgctggaatacgatcccctacttgataaacgtgattctcaatatcacgcttaatctgattgtgaatcttgatatacatcggttcttccatagtcgccacccccaaagtttagtactgctattattataatctaaattggtctagcttgcattaataacactgcttcaattttacagactattttttcttagcggtccacttcactccaagaatataaacatttggacgcttgttatattccacttcaacttgttcattatcattagcaactacactggcactaaattttgcttcatctttaacagctaagttagcctgattaggattcagcacaatattgtggcccttcatattagcttcaccgctcaaagctaaaaagtactcatagttcatatttccagtgaaggtaacacgtgtagcatcacatttcgcctgatcttgaaaatctgcatgagctaaaattacggcattgttcattgtaacttttgcttcatcaactactatcattcgattgatggttgaattttgaatgattgtccgtgtctttttatcaatataaaccccacccaaaaaagtagaattcataatattgctccagcagtcatcacttaaataaaagcaggaatcgctagcagacttaacttttgaattaagcatattcatccaagtttgcccatgcagtaatacataatctacttccgaattattaagatccaactccgcattcgttttggcaaaagtattaatactgccgtgaatctttgaattatttacaattgctgttccttcgccttcaattgccaaagcacaatatttgtccgagaaataatcaatttctgaatcattcatttccaaacggaaattggcatggtcatacatggaaactgaaccgttaacaattttggttgaataaagttccaacgtgatcttaccattaaccgcgatagctgctgtatcagttcccgtgcccttaataaagcaattacgcaaagttaaatagccatcaacgcctactggtacagataggctattatgttcggtagttgtatcaatgcataaattttctaaagttacataacgactatcttctgaaacactaatatagccataaatagtcgtgtcttctggcaaagagcctgttcccttaattgtgatatctgttagtgtgatgccctgcggcaaataataatatccggggcccagcatcaacacatcatcggcacgcaaatcctttaaaacctcgtgccaactgactgaactgctagatccccctactctaattatcctagccatccattatcctttcatctcgtaaaaaccgattactattgtactaattttctttaatttatgttgtatttttgctcatcaaaaaagctaggttcgattcctagcttcttatactatttcattttaacattccagtaataagccacattaccataaggagaaagttggaaacctttcactctcttattcaataagtatgacgtaccttgttggaatagtggtgccgcaaaggcatccttttgaattaattgtttttcagcgttaactaaggcattcaatctcttctgcggatcagtggcataagttgaacgagccaagtcaatttgcttccagaaattggcgttgtgataatctggcgctaaattaaacaaaccaccaactgtcaagaaatcaattggatcttcataacttggctaccaagttccgtaaacaaagtcgtaattgtgattagttgtgttagatagccgtgacttcaaaggaattgaccgtacccgtagagttagaccaggtaaatttttcatcaaattgctttgaataaattcacccacacgcttagcatcgtcaatatctgaagtaagcaattctaaggttagcttcttcttacccaattgcttcaaaccaagttgccattcctttttagcttccttggcattataggtaaccaagtcgccagcatccttgcggtaatcgttgccagttgcctgatcggtaataaagtttgcggcaacaattccatttgacaccttgccttgatgcaaaactgtcttgactaactgttgcttattaattgcccggctaatggcccgacgaatatgaacattgcctgtactcttacgcttcaagttgaaagaaagataaccattagttggcgtaactttggtatgatagctagaattattttgatactgcttaacaaaatcagaagtcaatgtcgtgtaatcaagttcaccacttctgaacaagttaaccccagttgaaggagtttgaaccacttgtacgttaactttattcaaatcaacaattttcttgttccagtaagttggatttttcttgtaagtccacttcaaatttgaacctgtccaaccagatacggtaaatggaccattgtaaactagattcttactgctagtcccatacttagagcctaactttttaaccaatttagaattctgaggatagaattgtgcaccctctaagatttgtggcaaatatggaattggattagctaatgtaacttgcaccttatacttgccgagtgctttgattcccaatgaatttaccggtgctttaccttgagaaattgcctcaccgtttttgataatggcataagaatcggcatctaaagatgaattttttgggtcaacggttctgcgccaagccgttacataatccagggcagtaactggatcaccgttagaccacttagcattattgcgtaaggtaaaagtatagaccttctggtctttagaacgttcaacttttgtcgcaccagctaattctggctgatttttcttattaaaacggtaaagaccttccatggaattctgcaaaacttctgaactagtcgtatctccatacttgctcgaatctaaagttgaaatttcatttgtgacagaggtattcattgtcttagtcggtgcagcattactgtcattgttagagcaagctgccagcaccaatgcggcagctgctgtcatcactcctgaaaaaatccattttttacgtctcaatcttctcaccctttacttactttttgtttaatacttacattttacaagtatatctaatacggaagaaatttcaaatactttttccgtataatagctataatcaatacgtatacaaaaatggcaaaaaaaaagaaacgtcacataggacgtttcttttttcgggttgggtgttcttttagaactattgggttagctggattcgaaccagcgcatgatggtaccaaaaaccattgccttaccacttggctataacccaataccagctgaactttttacttgtcgttcaacaatggaggagggtggattcgaaccgccgaactcagagagagcggttttacagaccgccgcgtttagccacttcgctactcctccgttagctgacttaattataataacgaaaatccaaatcaaatgcaagacttttttgaaacttttttcaaaaaaaagaagaagccatgacgacctcttctcaaaatttaaaaattgatttatatctaaacagttaattttaagcctaatgccttttgtgctacttgatttaccagactccattgcttgtcataagttggtgaaaagaagaaatctgcttctgctaaatcttccagtgtcaacttatttctaatagctaagctcaaaacattggcttggccactaatgtcatatgatgaaagtacgctaccgcctaagatttggtggctgtcttcattataaacaacagcaatatagcaagtaggattatctttttcaggaatatagtctggacgaagataactctttaagactgtttcttttgcattaattcctgctcgcttggcattcttttcactgagtcctgttgttactgcatgtaaatcaaaggcttcaagcaattgtgcaccaactaagcccttaaagacacgttctggcttgtcttcaaataagtgctcaacaacatattgagcctcatgccgtgcagcaatggcagatggcatcggtactcttctgttagctggaatgctaaatgggaagattgcatccccaattgcatagacatcctttacattggttctaaagtaattgtctaccttaatgtagccattgtcataaagatcgatcgtgtttttcaaccaatcagtatttggcttaataccaactgtaataatgacacaatcagcagtaatatcacccttatcagtctgaactgcattgacctttccattgccaacaaagccagtaactttagtgttcatagccaggttaacaccatgatcagtcaattctttttcaaataagctagtataagtatcattcaaataattttctagtggtttttgcccaccgtcaattaaagtaacattcttgcctgctttagcgaaaacctcggcagctgcaattccgttaccagcaccaataactgcaacatttttaatagcttcatcttgagcagctgcattgatctctgtagcgcaatcatagcctctcatcaacataatatttttcaggtctgctccaggaagaggcaaacttgcggggttaacacctgaagaaataattagcttatcataactaacttctttggttgtaccatcttttacgtttttgacagtaaccgtctttttagctggatcaagagctgttactgctgtgttattaacaactttaccaccccgttcaactagatcttcaggagtaaagtttctaacgttgtcttggcctgtagtttttccttcaaggaatagcttcattccgcaagacataaaggaaacgaagtcgcctgcttcataaatcgtaacgtctacatcatcataacgatctaaaatttcataagctgcctcttggccgccgtgggatgcacctacaataatgattttcttttttgacatagcctgacctcctaataatgcagcaataattgtcgtttttaagtaatagcagttattgtaactggttacattatttatcttttaataagatatttcaattaatttgcttttgattagtgcgaagcagcaatatattttttatataaaaaagagcactactgatagtagtactctagagggaaattttccaaaattatcttatttagctaattctgctgatagatttcgttcactaatttagtgatttcattacgattaagaacttcatcatacatatccattgtttcctggattgtattttctaaattagtaccatgatttttggcatagccaataaacttttttgcatctactattttagcttctttaatcgctttttctgcagctcttttagcaacttcattcatctcatattctggcttattcatgtcttcgacccattttccgctattcacgtagtagtcgatatccttctgcaggctgatatccctgcgtagtacatcatccgtttttctagatcatttttacgtgttgtttgcatctcaatatcatacactcgactttgatcatcttgtgcccagatatctaagcgaatgtttttggattctagtccaatgttgccgtcatactgggtaatgacattaacttttgtcaattttaattcaggaaacatccgacgtagcagttccagacaattctttttattgctcataacatgaccgaataccaagtcgttagtaattcgaggatatcgattaattcttctcctcatattttacctcttttctttttcttaagtaggaaaattaccctccactatttattactcaaaaaagtgcaaatttttcagaaatttaaaaatttagacacgaaaaaagccgatgcaaatgcatcgactctttcagttaaattattctactttttaatagaagtttacagccttgatgtaacgcttgttgttgtttctgcagccttcaattctgtagtacttcttaccgttcttaaatctcatttgaccaccgtaagtagttacagtttgacctctgtacatcttaccagtacctggagtacgacggtatgatgaccaataaatgtaggcattgtgcttaaaagtacgttggttaccagtaatgttggttacacgaacgtattcgtccttgttagccaccttgtagtaagtcttaccgttgatagttacaacagttggaacgatttcaatgtcgttgtaagcgtagtacatgtgacctaagtagttaccgttcttgtcataagctcttgaatcaaccattactggcaaagtcttggtgttagtgtcaccagctggcttaacaagtgatgaagtcttaacccaaatgttgcttgagttagcatctgacttagacttagttgaaacttgtgagtatgatacattgttaagggttctagtttgatcagcaacgtaaacagtgtcaccatctttgaaagtagttgaagctggtcttacattaatgccataaatgtggtaagttgcgattgagcttgcgccattagcatatagagcttgtttgtggcttgaagtaattaaaacagtgtatgttgcagtagtcttcttaccagttaaaccagtagcagttaaagttacattatagtaacgtcctgcttctgaagtattaacaggatttgaagttgcttctagtgaagcagctgtattattattgctgttttgtacagctgaaataataactggctcaccattactatttacaaaattagttggattaaattgtgaaccaacagctacttggaatatttgaccattaacactccccttgctttgaccattcaatgaccaattgatcactggattttgagtagtatctgtagttgaacttgaacctgaaactacaactgggatttgaacagtagctgtttgcgtagaagtagaacctgtaccagttaaagtaagattgaaatcactagttggtaccgcagtaatattcttgttatctttacacctgcattcttaagaatagcagcaacttcactatctttaaggttaactttttctccactggcattattcgtactaaagaaaactaatcctaaatcattaattgccttagtaacactagctacagtatctttagccttaatagaaatagtagttggtacaacattagctgttttatcggtagtacttgcagcatcaattacttgattgccatatgtaaagtatgatctatctgttggctttgctgttgttgctgtagtagtacttgtagtaccagtagtgttagttactgtacctaaactaatagcagcgttaactggaacagctgaagctgctacaggagcaactgccaacaaagcggcagcagccatacttacaattcttgtattctttctcataattatgtggcctttcctttctgaaacagaaattcatcctaagcagtaagttatatcttcttctgcttgtgaaataattatagcatgttacgaacccgattactaaaaacaggatcgactcgtgtgtgtgattttaagaatacctcctaaaatcaccagtaataccctaccctttatttgttaaactgtagttaccggacttttacaattaagattcaaaacattacatttttgtgaagttttaaacaagttattgatttatgacagaacttatgtgtgttaagaaaaggtaattttaacacttgttcgcttaaaaaaattaaagctcttagattttttgattagaaataattgcttcatgttctttaatatgctcaactcgccctgcatcccccgcaataagtaacaaatataatgcctcaatcattgtcatacttgccacgcgtgagaaataatactgcgattgcatcaccgtctgccgcactgctgtctttaaatgcacatcagctaatagcgcaatcggtgaatcatcgcgattggtgatcgcaatcaccggcatccctttttgtttggctaccttaatttgcttaatgattcccgctgcttcacctgaattcgaaatcaccaacaagcaatcctttttactcaggttcattgtctgcgcaattgccgtttcaatcgtgccacctgaatcaattgccaacaagccaatctgattaaacttatacactgcatcagcggccaccggataagtatcgccctccgcactaacctgcacaattctgctttcagtcaaaaaatgcagcacctgatctaatttggcttcagtcacattctccaaagtcgccttaatctcggcgactttatttttttcaatcaattccaaattagcactagcatcatcacgtgacatattttgaagtgacacactttcagttgcattctgagctagttgaatttttaaatcatgaaaacctgtcaaatctaaattatgacaaaaacgcgtcaccgaagcatcactcacctcagcttcagttgctaattttgaaattgtataatttaccacctgttcgggctgttttaagatcacttgagcaatcttctgatcactggctgacattgtcgctaatttactatagattgtatcgataattttagtcattattctcaccttttctgtgccaaaattatatcatcaatgtaattaattttcacaattttatttttaaagaaaataaatttatattttgattgacgaaaatcatttaccaaggtagtatgtatttgtaaataattttcacaggagaaaataaaatgaaaattaattcgataagtgacctcgctttaagtaaaatcaagccgaaaatgactatttctcttggcggcggaagcaatgtatttaagttatctcaagcgattgcacagcataacttagacatcacattatattctccatccgaacttactcgctttaggtgcaaagaactcggattagagcttcttccatctactgcagcgactaagatcgatattgcttttgatggttgtgacagcattgataagaattttaacgttctaaaaagtttgggtggaattcatctttttgaaaaacaggcagcacaaattgccaaacagtttatcctactcttacccagtcaaaggatacaaccgattctgaatcctaaaattccactttgtcttgaagtggcaccgccttgtgttaatcaagtacagaagtatttaagcagtttacatttaactagtaagattcgacaagatagttcagtagctgcatttgcccgtacgcctttgggcaactacttaatcgatgtttttaacgaagattggcacaatatcactgaacttaatcgtcaactttgtttacaaaatggcgtagttagttcttcactatttgaaaacttaactacttcattaattactgaaaaagacggagaaattattgaacttaagagaggtaataatcatgaaaacatttaattggggaattattggtactggctggattgcacatgatatggctgatgctttgaacaaagtcaacggcgaaatttatgttgccgcaaatccaaatgaagaagcactccgtgcctttgtccaagaaaaacatgtacagcatgctttcactaatcctgatgaaatgattaaggatcctagcattgatatcatctatattgctaccccacacactttccactacgactacatcaaaaaggccctcaatgctggcaagcacgtcttttgcgaaaaggcaattaccgtcaatgcacagcaatttgatgaagtggctcaattagctaaagagaaacacctaatcttaatggaaggttttactctttatcacatgccaatctaccaaaagatgcaagatatgattaagaccggaaaatttggcgaaattaaaatgatccaaattaattttggctcactcaaggactatgatccgcagaatcgcttctttaataaggagctcgctggtggtgcattgctggatatcggcggctacgcaactgcttttgccattagtttcatggatgaatatcctgaaagtatcaataccacggtaaaattctttgaaactggtgttgacgaagaaagcggcattattttaaaaaattcgaaaggccaaatggcagtgatgtcattatcgatgcgggccaagcagcctaagcgcggactggtttcgggcaccaaaggttatttcgaaatcaatcaatatcctcgcggcactgaagctgatattacttacacccagagtgctcatgaggaaagctatgataaggttactgccggggatgctgatcaggcgcttgaatatgaagtcactgattttcaaaagtatattgaacaaggccatgacgaaggcgaattggaaaaatcgcggatgatcgctcacattttaaccagcattagaactgcctggggcatgacttatccatttgataacgaggaataattagttggatttcaaaagggatcgatacataacatcggtcccttttatttgcacttattgcttattttctgcgacatatttttctagtcgtttcaagccttctttgatctgatccatcgacgttgcgtaagacaaacgaatatatcctgctccacctttagcaaaaaatgagcccgcaattacagcaacatgcctcttttcagccaaatcataaataaacttggtatcatcttgttccaagcctgctggaattttggcaaaaatgtagaaggcacctttaggcttaacgcattcaaagcctaacttggttaatccttcataaagcacatcacgccgcttttggaattctttcttcattggttccgcatcgttcattccattgcctagtgcttcttcagctgcatcctgcattggcgttggttccgtcgttgtgattgcttggtgaatcttagccagttgatccaaaatcggcttaggcgcagctaccacaccgattctatagccagtcattgcccaagcttttgacacgccattcattaaaacaacttgatcatgtaaagtcttttccatcgaagcatgtggctgatcataattgagctcactataaatttcatcacaaagaacaaaaaccggcttatctcgaacaacatctgctaaggcatcaagttcatcttgtgaatacatcacacctgttggattggtaggataattcatgacaagcgccttaacgcgatcaccatacttgtccaatgctgcttgcaatttatccggcgttaatttgaagtcatcgtcagaagtgtcgatttgttcaaccgttgcacccatggatagggcatccccaatataaagcggaaaaattggtgttggcaccaaaacaacgtcgcctggattaagcgccgcagtcaaaaagtcgtagatcgactccgttaccccattggtgatcaaaatttcgcttgggtcgtatttttgtccatatttttcagctaaaaaatcggctgccgccttgcgcaaacctggagtcccgttagatggcgcatagtgtgaatggttattagcaatgctggcttcagccgcttttttaatatgctctggcgtgttaaagtcaggctcaccaatcgtgaatttgacgatgtccgaaatcttgttggtgtaagctgcaaaggccaaaatctgccctggcttttgttcaaccaagccttttttcatatgttttgttaagtcgaccatagtttttcctccttatatcgaactaaatcaattcaaatataggagtctttttaatctttgtcaaaggaaatattaattttgatatctaaagtgcacattaaatccaataattaacaaagcataaatactataaatagccgtaacagtcggatacattgcctgatactttatcagcaaaagaataattaaaactatcgccaaaacaatcgttaatattctaaaacgttgaaaatatgacaaaatcggtaaagccactgtcaaaactatatcagttattaagatagtaaaatccaccggatatgatttgatataaaaaaactgaaatattggcaatgcttctaacagtaagaagatataactaataatcccacatattaaaagcaactgattaagtatctttttatagtctttcattaaatcaagaacttctcttttttcatgtaccagtgcttaaccagagtggtcaatgcaatgtacaaggtcaaaagtacaagaactacgagaacataatattctgggatcggaccgaatttcattaccttagccaagcttggaatgtaaggcattgcagtaccgatcaatcctgcaccgatcgtagcgagcattactacgcctgaagagtgctgttgtaagaagggaattgctggatcacgcaatgcttggataaccatttcctgtgtccagagtgattcgatgaaccagccactccagaagatggccataaagacagccttttgccctggagtagcagccacataacttgtgcccacagtacttggacaaatccagaagtaaagcaaggcaaacgtaatgatatcaaagattgaagatgtcggaccaaagaagaacatgaacttaggcaacttctttgtctcccacttacgtggtacttccaagtatttttcaccaactctatcaaatggaagtgacaaacaagatgtcccgtagatcaagtctagaatcaacaattgcattggcagcattggcaagaatggcaagaatgatgatgccactaagattgacaaaatattaccaaagttagatgacaaggtaatcttgatatatttcatcgtgtttgcaaagatctgacgcccaattcttacaccatgttccaaagtacgtaaactcttgtgcagcaagataatgtccgcactcttttttgcaatatcaacagccgtatcaactgagattgctacatcggccttcttcatggctggcgtatcgttgataccgtctcccatgtaagcaaccgtgtgaccattttccttcaaaatctgaataattctagcctttgactctggtgaaagctttacaaagaggctacattcttcaaccatctttttaacttcatcgtcgctcttaccagcaaaatctttttcactataaatgtacttggtgttcaagcctactcttgaagcaacactcttagttacagcagcgttatcaccagtcaaaatcttaacggtaatatcgtcttgctttaacttcttaagcacgtccttaacatcatccttaggtggatcaaggaaggccaagaagccagttaagatcaaatctttttcatcgctaacattgaattcaccggcttgagcaggattgttcttgtaagctaacaaaacaactctcaaaccatctttgttcaaatcttcaatgtgctttaaaactttttctttgtaatcatcagttaaatcgttgatgtgactgccaacttgcacacgattgcagcaagcaagcatttcttcggcagcacccttagttaccaggatacgaccatcgccgtggcgcttgaccacgacactcatgcgacggcgcttgaagtcgaatggaatttcatcaaccttagtgtagtcgtgtttaatttcattaacatctagctcatcgctagcggcatcgatgatggcttggtccatcaaatcgtgcatccccgtttggaagtacgagttcaagtaagccaagcgcaaaacctgtggattttccttcatatccaagttgtagtgccgttccaatacaaccttgttttgggtcaaagtaccggttttatcagtacaaagcacgtcggcggcaccgaagttttggatggagttcatctttttaacgatggtgccgtgcttcgacatttctagcgaacccttaaccaaattactagtaacaataactggcaacatttctggagttaaaccaacggcagtagcgatggcaaacaacaaggcgttgagccagttacctttagttaaaccgttgatgaccaaaactaaaggtgcaatgatcgcggtcattgttaacaataatttagaaatgttcttgataccaacatcgaaattagtttccttaacgtcgttgtttgaaatatccttagccaaacgaccaaagacagtttgttcaccggtggctaaaacaacgccaacacctgaacctgacacaatagttgttccttgatagattacatcaggatagtccaaatattgatccatgtctttttgatcgggcctcttagtcgcaatcttttccacaggcgttgattcaccgttcaaagaacttgatgaacagaacaagtctttagttttgagcaatctaatatctgctggcaccatgtccccagcgtggatattaataatatcgccgacaactacttgcttggtagaaatttcttcatccttttgattgcgacgaatattggtagttacagacaccatatttaagagggcttcaactgcgtcattagttttcacattctggataaaggatgttaatccagaaataatgatcatcgcaatcataatgatcacagtactcaggtccttttgatctgccggcacgaagacgtagtcggtaaacagcgacaccgtcgctagcagcaacaggaccattgtaaaaggagtgaagaatgattcaatgaagaaatgcaatttcgtgttgtgcttcttggtagcaacttcgttaagaccattcttctccaaacgctctttagcttccgccgaagacagaccgtctagcgaactatgtagcgtctttaacgcttcttcgggagtttgcctagcgatctgcttaacaaactctgtatcggctgtcttcttattaatcagcaacttgttttttgccatgttaatcacactttctgattaaacacgcaaacaaactaaaaaggagccaataccaattagtattaactccttatctaagcgatgtttcctcgtcgttcagttttgacactacgtgacgtaagcacaggctagctatctggatctcgccttatctcgacaagaactattttactcgttggcatctctggatgtttccgggcgatagcttgtgttcacgtaggagcctcacctaacagtttatttgctttttcaattttcatttttattatatgcatattatttgacaatgcaattatctttactaaatcgttagaaattgtaaaagaatttaagaatgataaaaaacacgtgtttgcaatgaacacgtgtttttttataatttaattttgatatactattctatagacatggatatgttgcaactatttgtgtttagtagttttagcataactaaccacccctcacacattttgaaattacggcggtgagagttatgcataaacggatagtttggaggtttagtgctccgtggtagcttgggctattgcaatcagcatcgttctaggtgctttaggcaatttagctatcaatttggctatagcctatgcgataacaaaaaaagctaatcgcaaggattagctaaaccaacagttatctgaaactacgatcgaagtcaacggattgcggccgtgggcttcttttcatatacagattataacatgaattatccgaaacgaataaaaaagatcaggctcactgcctgaccttgctattgggttagctggattcgaaccagcgcatgatggtaccaaaaaccattgccttaccacttggctataacccaatcttcaaaccttttacttgattggttctatttgaatgacctctcgatcacccaacagatattagtataggggaatgaagaaaaaatatcaaggaaaaattcaaaaaaattttgattttttcacatttgctcgaaggatactgaatctttcttttatgaattataaaattaatttgtttttttacgattataacttttgtgacttcttaaccttattcattaattcaaagtcgttggtaaaaattccagctacaccaagtttaaagtacctttttgctatgcttactttatctactgtccaaattctttgcgtaactttgctaggtaaataccaatgcggatggatcgctgcaaaatgattcttagccgcaaactgttcaggaaacggcaccggccatttgtttaaaaagcaatattgttggtggggatcaattcgctggcaattttttaaggtttgataattgaaggaagagaaaataatgggatgcacaaaatgatattcttgtgctaacgccaaaacgatggcttcaatcccctcatcatgaatcttgttagtcttaaattccaagttaacatacaaatcctgtccctgaagaatttcaaataattcacttaacatcggtaccggttcaccgttagctaaacgaaatcgcctgatttcacttaaggtatagtccttaatataacctgtcccattagtagttctatctaacgtttcatcatgcattactaccggcactttatctttagttaagtgcacatcaaattcgacaccttcagcgccatgcgttgctgcatatttaaatccttgcaaagaattttccgcaaatttgaccggtaagccccggtgagcaaaaataattgtctgagtcattttttcacctacaaaaaaatgccgctctcgcggcatctgctctattttaatctaagacgattgcaccttgagttgccaaagtatcacgaactagattcttaacatctcttctaactaccataccatcggtgttctcaacgtattcaagatattgagctgacttaatatgtgcatcataagccttgtcatcaaagtaaacttcgacaaaataccattcgttttcgttcttcttattgactccagacatcataatttccatgcctggttcagcagccatgctagtcgtcatttctttcttaacttcatgcgcaaacttttctgcatcttctggtttaacttcaactttaactaagcgcattacaaaatgatctgcgttatcattcaaagcatcatgagcctttgtggtaataacttcgggctttaattcgattacttctttgtctgtggaaatcttgtcgatggtttctgcaaaatcatcagcatgtgctgctgcaatgtgcaaatcttctgccaagctattccggaacaattcgatttcgtaattgtcttcaccatgagcatcgtcatgtgcgcttccaattaacaaagttccttcttcagctggaattgagttgtgcatgttattttcaacttcacggatatattcaccgcgatcgttttccttgatatttaatttagtaattctaaaaattggtgtttcatccatttttcttgcctcgtactataatctttccacacctatcattataaactaatgcagaaaaataaaagcccctattcaccagttatttgatcaattttaaccgctttagctggccattcagtccgtacatattccaatgtactgccttcattgctagttaactgcacaaaagaacaattgggcagacctaaaaattcacgatggttagttttttcattaatgtattgcgacaaactatcgccatgaccaacaactaaaatattatcgccatcttgtgcatcccgcatgatcaagttaatcccgcgctccattcgctcaactacctcatgattatcttccacgcgaaatttgcccaaacgatgcagcggccaaagtagcacattgcgtgcctcaaaagcgccatagcttttctcttttaattcctttaatcgaacatactccatctcaggcccagcaataatctctaaagtatcacttgccctttcttggggtgagcaatatgctctagcaaaattaattccctgatcttgaaaataatcccgcacggcttccgcctgcttaatgcctaatggtgttagcgctgaatcacagcttccctgcatgcggtgtcctttattaaaccaagtttgaccatgtctgactaaatataaattaattgccatttcgtcttactttaaaccctctgctggccacacgtatgaatcaaaatggatctttttaccatcaactgttagcttcacgattgaagcattgccaaaaccgccaaagttcttattctcggtagcatcgcgcacaaacttagctaaaatatcaccatgtcctacaactaaagcagtttgaccatcctctaagccgcttaaaatctcgactaccgcacggtgcattctagcaacaacgtcttcgtctttttccatagttgggtctacgttaggattattataattccaaggcaataagaactcatcacgaccttcaaaaatgccataacatttttctcgcaggtcttttaaacgcgtataaggcatttgatgatcagtaataatttccaaagtatcgcaagcacgctcttgggttgatgaaaaagctttgtcaaaatgaataccctgctttttaaaataatcacgggccatttcaacctggcggatgcctctttcattcaatggtgaatcacaacgtccctgaactttatggtaatagttaaaataagtttgtccatggcggactaaatataaagtttttgtcatattttcctcgctaaatcgttttttcctttatcttatcaaaaaagcacgcgtcgtgcgtgctttcatattttttcgttaaattttgaagttcttgttgtattcactcgaatttacaacaaaacttggcacactaatgaagtgcattgagtaaatattgccagtcttggaaatgctaaagccataataattgtagtccccatcatgacgtgagccctgtgtattaaataaatcaccggcatgttcccattcgcggtaaaggctcttatcattacgctgattttccccagctcctgcaaagccaaagatcatttgcttcaagccaaagtaaatatttcgcttcatttcagccatagacataatcttcttattagtagaaaaaccagccatatcttcgacataattatcgtttaattctaagccatgtttcttgcaagcccgtacaattccggcaacatagtgatcgccatctttgatactcttgccattttgctcgtattcttgcgcaattgaattagctaaggactctactccagaactataaacccacggcttcaaacctaattgactacgagcactattaattaggcacaaagagaattctgccagttctttttgctcactagcagaaagatcggcaagattgatcattttttgatcggctttgctttcacctgagctaacacgtgaaaagtcgttttgctccattcctttcatgcaagcctgaataaaactagcacttggcttccccttatatgcttgcaataaactagctttcgtatagccactcggcatcttcattgtagctgttacataattctgcgttgcagcagtctttttaacgagtttggcatttttagctaataaccattgagagttatttccaatcttataagccaaatattttttcttgcccagctttaaatactttttagcagaataagaatactctcttttagctacagcataatacttagacttcttgcccttatttgtataaagtctaactttcttagttcctttaacctgaacttttcccttaactgctgcttgaaccgtttgtggtgtcgtttcgtgtattacactagccgtccccatcaggcaaacactagtcaacaaagtcacaattaatttttgcttcatagctgttccactttctgtatgttttgattattaatatttgttatttaaattatatcgtatttatttaattaaaaaaatcaaaaagagacacactatcattttgacagcatgcctcctttaagttagtttgattttatttagttttgaaaagaggtttatttttagtaccagccgtttgcttgccagaatgccttagcagcagtccatgagccataacgacctttgacatagttatcagctactcgctcttggttagctgctgaatagtcaccattcaagtatgaagctgaaagttggtatttaccaacgtattgaccatttgaagcaccgtatgagccaccagattctctaccggcaatccattccttagcactagcttctgaaccacttacagttgaagtagtagtttgagtgttggtgttatttgctgcagtagtagttgctgcagaattagtattttcagtttgagtttggtgttgtactggagcttgggttacagcagcttgagtgtggtagccgcgagttacatacttagcacgaacccattggttcttgcctaagtcataccacttgtgacctttggcatcgtaagcagtcttaattactttccatgaggtgttgcttgccaaagtttggccagtagcctctggattcttgtagctgttgtaaacagtgattgcgttgtctgaaacgttcttaactgttacaacagctgtatcgttttctacaatagcagcttgagcagtattagtgttgttattagctgctactaaacctgtaactgataaagcagttactgcaattgacttaactaagatagatttaattttcaaaaaaattctctccttaaaattttaaaagtcataagtaacgaattttcaccttattcgtccgtcccattcaattgacacagcatatactaccttgcttaaattgcagaactataacaggaatatcacctgcagattaagaaactattgcaaagtatgtcaaaattgtaacaattgtaatatttatgtaaatttattcagatgatacaaaaccgcatcagatcgccatttaactcgatttttaatttttatttgctatgtgcaaaagcttgttcgcatttaatatattgaaacacttttgcaaaacgaaaaaagaaagagtttcctctttcttttttaattctcacaaattttttattaatttattccattattctgccttatcctcttctataagttgacgtttattaagtgccgcaataaatggcaggtaaatcaaaatgtctaagataatattgattacttgcaaaattgagcccgcaatactgcctgttgccaaaaaaactgaaataattggcggcattgtccaaggaattacagtcccattacataatagaactaagcctaggttcattgcacaataagtggtaatcgcatttaacattggcgcaatcataaatggaataattaacaacaagttcattacaactggcagaccaaacatagttggttcattaatattgaacaagccaggtacgatggtcagtggtgctaaaactttattttgtttacttgcgcgcttgcgccatactaaatatccaatgcaaagcactaacccaatagtggcacctccatcacccatgtaaacaaagttatcgataaatggttgcgtaacgatatgaccaccatgagctaaatctaagttacctgcttgattcaatacacggttagcatcggtttgcatcaaccagattggttgcatagcagtattaactacgttaccaacatgaataccaacgaactagaacaagctcaataaaataattgaaactaatgtaccaattaaggtatcgcctaatgcacctagtggcttagccaaaatattcatgattacatcgtgaatattgccccatccaatccaagcaaaaagccagtaaacacagccagcaatagcaattacagcggcacctggaattaaagctgaaaagctcttagctacagcaggtggcacagtagctggcattttaatttggatattatgattaataaaccattggaaaatccatgcacttaggagaccaaagataatagctacaaataatcctctactacctaagtaagtgtaagggaagccttcaactggaactttatctccactcataatacttggcgtcaaaatgaagaatacagctgcagaaacaattccggcagaaacaccatctgtcttatattgattagcataactccaagcaattccaaaagctgcaattaagaccatgatcccaaaggagccattagtaatcttggctaaaatctgtgccaggcttataccatgaacagcagtttttgatagccaatcagaccaaccggcaactggaaatgaattaatgatcctacaataattaacggtatagccatggcgataccgtcacgaacagcaattaaaggtttaaaactgcctattttagcggctacaggcataatgtgtttgttaacaaacgcattcaaacctccgctcgatttactattagccataataattccctcttcaatctaaaaatgatctcgtgtttctttggtatatacctttcgcaatataacaatatcctgaaagcgattttattaccactattttaaaagataattttttgcttatatttttaaccaaagtttgattaacaaaatattgcagttatggctgtaagtgctatagtttacatgtaatcataaaaaaagcgaggaaataaaattatggctaaatacgaagtaaagttaagcgaagaagatttacaaatgatcaaagattgtcattcaaagaacccttcaatcatgaaggctatgaacgaagccaagaaagtcgaagattaagcaaattttgatctctaaatcgaaaaaaggcgtccgcaagggatgccttttttattggttttcaaatcttgtaccgtggggatgcttccagttataaacacggactattttacccatgccatctagcactacaacatttccatcattatgtagataaatcaatggatcagaatgtgaaccaccgtcagtaaaaattcttgctggctcacctgggtattgcactgttctaactatacaatcatcaattgatagccgcctcatttgtcgaccatcatcatattttccttctaaagcagctgttggcgtatgaccagtcacaattgttttgcccgttttgttatgagccatcattttcaataaggaatcggaataccaatacttatctcgtgcccaaatacggtaaaaatcatagtcaaatttcaagccatactctatctcagagtaagtttccggatcattatactgttcatctggccgcacacccgcatgaacaaaaatcaagtgtggcgtttcatacataataggacagccttttagaaagcgataatactcactatcacgcaactcatcaggcaaaactgtactgccaaacagactaactaggctcttgccaccaccgttataaacccaaatgccatcttgatgttcctgcttctccgcaaaattgagtaacatttgctcatgattacccagtagtacgattgctccttcgcttttttgctcaattaaataatccaatacttccttcacatgctcgcggccatcaacatagtcaccgcccgcaactaattgtgcttctggaaaatctgctgttgcctgcttgattaagtctaaggtttctaagttgccatgaatatcagaaatgaagatatagttctccttcactcgatcatccaacagcgttcgattgataatttttttcatttcatactaccccatgtgctaaattaaactaacatttttttcttaattatagcagatgtacactggttctttttctatgcaatcctaaaattaacctccggcaaaaaaaaggctacaatagatatgaaaagaagtgattgcaatgtttaatgaagaaaatgcaattgatgccaaggacttacacgttgattctttcaaatatcaatcaactgaagacatgccatctgatgcttattctagctgggaagaaaaacacccaaacgccagggtattcaagcttgaatttcgcaacatcggcgaaagcaatgaatggcaggaaatgatcattatctacactgaataaataaaaagtggaagaactccaagcctagtgtgtttcttccacctttttacttattttgattttctttttccttcaatttgtgcagaatccgttcattttctttagtacgtttttcaactgctgcatcgatgatcgaatcaaaccaatgattatcagaatcatcgcttgtttgatccttcttttgaggaccttcattttttacacgtttgtcagtttcttcattaataatggaatccagccaatcaaaattatctggatcatggctcttatcagtcatttatttttcctccatttttgatttaaattaatttatttactattctttttgactataattgagttaacaagatgaaacaagaaagaagtgttcgaaatgaaaattacattcactgacaaggcgcttgactacttaaaaagacgcgaaatcttgaataaaattctaattttaatcgccgacgatggtggtggtaaatattctatcaaaggcggcggttgtgcaattggcagtcacttttccattatttatgtagacaaagttgatcctgattatccaatcaagcttgaaaacgaccaaggaatcaatatttacacttctaaatacgacaccacaatgatgggaccaaatttagtggttgactacgccaatgcatccctcaacttaaagagtgacgaaggattgcttgatggcggcgttgatatcggcaatggcgccgagttaattaaagctcaaaagaatgtaaaaatgaccggcgttgaatggcgttgctagattaagatgatcagaaaagacagtagtttgaaatcaactactgtcttttttctatagaaattgaccactattaggatcgaatccagtacgatctgccgcggtaatctttctaattaccttacatggattccccgctgcaattacattatctgggatgtcattcacaactacactgcctgcaccaataattgaattacgtccaataattgtatctggagttacgctaacccctgcacctagccagacattgtcaccaatgccgatcgaatgtgcaacacaaccaccggcttttcgctcggctggatcaaataaatggttgctggtatacaagccaaccttaggaccaaacaaaacattgtttccaatataaacaggcgcgccatctaaaatcgtgcaatcatagttggcataaaagttatccccaacatgaatattttgtccaaattcacaacgaaaattagggttcacgaagggatgctcacctgttgaaccaaagagttctttgattaatatttcttttttagcgtgatcattctcattattaatattattggtcttcaaggtagcaaggtctctcaaggtgccaaggcgaggatccgcatcattataaggacgaccagtagccatgtaattaaattttgttctaagcgacatgattctttcctttcattagttcttctatttttattatagaaaagaaaaagcgctttcgcatgtttgacgcataatatttagcacactagccctaatcttattgcttattctataatggtaaaaaagaaaggattaaagccatgaaaaacttcaacaaatttaccgctaaatttgctcgccttttacagaatctactagtagtcgcaattggtttactcgggattattctgatcatactcttattccgcgatctaattccactttgccaatcattattttcaactaagatcgaagaaagcaactccgagattatgtcagaaattatcgttttcttactcttctttgaatttactgcaatgattatttcagccttgcgtcatcacggtcacactagcatcaattttctattgggcttaggtgttactgcgctaattcgcagtctgattacttctcatagtaacatttggagtacgcttgccacttctgcttcaattttagtactagtaatcgcaatggttattttcaataaaaatctgcgtaatatgtaaaaaaactgtatcactctaggctaatgtcattggagtgatacagttttttgttttactaattaactttgcgccatgaactcattaagttgtttcttagaaaaaacattgccatatttgcatactacgtttcctttcattattgaacgtaattcacacaaccaaaaaagcatcatttattaacaatattgaaaataaataatgctttttagtaatactctgatgctgaatgccagagtcgaactggcgaccttctctttacgagggagatgctctaccaactgagctaattcagcaaactcacaacacatgaattataccaaatgtcgctaattggcgcaacgacctttttctaagctagcattcaaaaaagaacattatttccaatctaagcacaatccttgcttgtgcaattcttctggcaattgatcacgatcagtttcatgcagatcaagttttttacctgtaatctgcttagtgaatgaatcaatgcgacggttagaatcacgtaagtcataatatgtcgtaactatatcatcatagtctttaaggtctttcacatcaaagtctttcttataactaccttcaaaacaagtgaacttaagtggtaatcgtggttttaattgtggcttttgatctggcataccgacttgcatccccaacactggaaaagtcaactcaggcaaatcaagcgtcttaagcaaatccaacggatgatcgttaaccgtaccaagtggcacatagcctaagcccatactttctaccgcattagcgacattttgaaaagcaagcagcgtatcttctattgcttggaaaaagatatcagttgtgtgaacacggccgtcgtctttgtcaagttgctttctaatttgttggttacggtacaagtcaacgataaaaataaacaaatcgccttctgcaccaacatatttttggttacataacttttgaattttcttcttttcttcaggatcggtaacgtgcagtaagctagcattttgcataaacatgctggttggagtttgaccaaagacagaatacaaagtttccagttgttctttagtcaaagtttgatccttaaattttctaatagaacggtgatttaattgcgtgtcgattgtttcgttatgtatcattttcatccttcttactaataatcagtaagttcattataacaaataatatggctacttttcttcaaattcaattccgtaatctgcttgctctccgtgctcagctaaatcaagccccattaattcatcttcttttgatactctaattggaataatccttttaagtaataaaacgattatcgtcgtcatgatccctacaaatatgatagtaaataaagttcctaaaatctgagctgtaatcaaatgcaacccgccaccataaagcaagccattttcaatttgcgggttaacaatcttagtcgcaaataatcctgtcaaaatcgaacctacaattcctgaaacgccgtgacagccaaatacatcaagtggatcatctagcttcaattttggcttaatcacatgaatgaagccgtaactggctagtgtacaaataaaaccaatggcaaaggctcctgccacagtaacatagccagctgctggcgtaataccgactaatccacacaaggcacccgtacagaggccaatcatagtagtcttttctttaataaacatatccaaaaacatccaaaccacaaatgacgtaccagttgcaacagttgtagttaaaaacgcttgtgtagctacatcgcttacagttaaggcagaaccaacgttgaagccataccaaccgatccataatatactggttcccattaaaacccatggtaagttataatgcttaacctcaccatttggatcaaaatcaattcttggaccaacaaaaattgataaaaacaaggcggtaataccggcggtaatatgaactacagtcccacctgcaaaatcaagcatccccgttttggctagaattccatctggtgtccaaaccatatgaaccattgggtaataaatcaagatcgaccaaattgcgacaaatgcaagtaaaaatttaaatttcattcttccgaccaccgcaccaacaaacaacgccggcgtaataatcgagaacatcatctgaaacattaaataggtcaaaattgtgatgcctgaatccttggaataaagcgtctttaaatcaaagccgtttaaaaagacacttttactcaaaccaaatattccaccaacatccttacccaaagccaagttataaccaaaagcaataaacaaaacgattgcgacacctgtaatcatgaatactgaaatcatcgtattcacagcattcttctttgaaaccatgccaccatagaaaaaagcaagtccaggtgtcataaagaaaactaaaacactagcgacaaaaacaaatagagtgttcgtttgattaatcatctttttttctcctcaaagtaaaatagttagtcctaatattttaaattggtatatacactatttcattgatgttgcagcatatatgcttaattaaaaaatattggtttgataaaatttaattctcattatacactcatttttcttcttgtcattaattttctataaaaaataagtgtctgggaaaaaactaagtctcagatcatgaaaaaagaacgttgaatttttgtttcaacgctctttttgtatacttttagctccagccttgatattattaaatcatcacaaaataaaaaaggtggaaactaacatgtacaagaattatatcacaggtcaaactgctttaacacttaatctagattttgccattccggccaatcatttggctaatgtcatcagctggtttgtagattcaattccagaagatgttttagtaggcaagactgctaaaacgggccgcccagcctatcatccagccatgatgctcaaaatactgctttttgcttactccagaagagttttttctggcagaaagattgagttgatgctggaagaaaatctgccaatgatgatcttggctgaccagcaaaagatttcatatcatactatcaataattttagatcaagcagccatgccaatgaactgattaaaaagagctttatctacttcactaacctgttagaagatgaaggcttaatcaatgaaggtgctgcttttatcgatggtactaagattgaagctgatgctaaccgctatacatttgtctggcgcaaagcggttgaaaagtatcatgaaaagctgaaaggccaggcagttgaactttatgatgaattgattactaaagaagtagtcaaagaaatggaaaaagaaaaagttcaaactagtcaggggctaaaggaattagctcaagaaactgaagcagaaattaacaagctgactaaagagattgagcaggaaaacaaagccattcctggcggttcacctcgaaaagccaagcgacgtggactaaaaaagattctgcaccggctaagaaaagattatgtgccaagaatgcaaaaatatgaagaagccgaagagatctttgccggacgcaacagttattccaaaacagatcatgacgccacctttatgcatatgaaggaagaccacatgaaaaatggtcaattaaagcctggctacaatattcaagcagtcacgaccgatcaatatgtagttgattatgccatctttcctaatccgacagatttcaaaactttggagccggttttggatcaaatgaccgtgttggacaagtttgacaaaatcgtcgccgatgctggctatggcagtgaatacaattattcgatgctggaggaaaaatatccagacaagaagtactttattccctacactatgtatgaaaaagaacagaccaaaaagtataagaatgatccaactaagctaatcaactggtactacaatgaaaaagatgattattacattgatcatcatggcgtcagattcaatttcaaatattacagccagcgcaaggatcgttctactggtcaggtccgtgattttaaggtttatgaggcagacgagttccagctaacgccagaattggaacaattggctaaaacagctagcggccgccagcgccaagttcgctataatcctaactggcaatatttaaaagaaaaagcaaaagaagttctccaaagcgaagaaggcagacacatctatggcatgagaaaatatgatgtagagccagttttcggacatttgaagaacgtatttggcatgcgcagaacgcacctgcgaggtaaagagaaggtcgaaaccgatatcggaattgcctttatgatgatgaatttgaacaaatattgtcaaagaaggtggctgaagggccgatttttattgttaaaaattttaaagagaacaaaaaaacgatcaagattcttaaaaaaggaaatcttgatcgtttttattcatctggaagctatttttttcccagacacttgcatatatttgcttttaattatttgttttcgttttcaagattgttgattgcagtttcaaccaatgcatatgcttgttgagcttggttcttagcttgaacatattcgttcaagttgtcatcaccattagtaagcacacgtgcaaatgaaatttgttcagccatcaagaagttgaacaatgaatcccacttcttgtcttcaaacttgatttccttagcagaaattctaggcatcatttcacgtgtggtattaaatgccttttccaaaatttgttcatctgcatcggttaattcacgcacattgtatgcttggtggatttggtgaacctttaaaagttcttttaataaagttcttgcttgtgcatcttttgaaactgattggttaatttttaaagccatttttacctactcttttcttttttattaacaattataccaaattgtcttcgaccatttgcttaacgcagcgtttcatttctttaatatcaagaatactgtaggcaaattcttttctaagtagttcctttggcaaatattgatcgtacttgtcgattcctggcacttcgtttggataaaccagatcaagcggatcaaagtctttatcagcttcttcgcctaaaatgcgccagaagtcatgctcatcagcatccatggcaaaatacatgaagtatggtctagatgaattaaagccacggatatttaactttttaccgcacttaattcgaattaatcgctctagtgccaaaaatgcataagtcccagtccatggaaaaagacaccacatattaccgcccagcttgatcaaattattctttggcagaccagctaaagcggcggtgtctctagcttgcgtcaagcgagctttaccattttgcatcaaatatggatacatcatcttttctgcaagtacctttttcattctctgtaaaattttaggttgaatatctccaggtacatctccaaagtaggcaggaattctaccctttacttcatggcaatatacttgatgacgcttgatatccacgtcttcgacaacccatacacgtccagcaatcgcaatcttgtctcctacaggaggtggcttaacgatcgtacctaattcttcgctgccagcgtgaacactgaattcctcgttttcttggaaaactgcgtaaaatttaaagttattcacaactcgttcaccagcaagaccaacgatcagaccaccatcttcagtccactcaatgtgacctgttttaagcaagtgtttgagcaaaacgcgataatcgtcttggctcacgttgtggaaatatgacaaagttaacacccgtgaagcaagttcagctggcgtcatttcaccgcttgaagccagcgtactcatcgtctgatgatagagcaaactatatggcaaacggttaggttcaggtggctccacccatttttcttccgcatacagttgtaccaaggcaatcccttgaagtagcggccacggaatcagttctggcaacatcgctcttgattcagggtgttcttcgcgcatgacaaagtgcatctctgatggattaccgcggcgccctgtccggcccattctttgtaaaaagccagacacagtaaatggcgcgtcaatctgaaaagcagattctagtttgccaatatcaattccaagttccagcgtagctgttgcacaagtcgtcatgtagacatcgtcatctttcattgcggcttctgcagtttcacgcaaggcttgagacaaattaccatggtgaataatgaagcggtctggctcatgattataggcacaatatgctctgagctcctgacaaacagcttcacattcttcacgactattggtaaaaacaagacactttttaccacgagtatgctcaaaaatatagccaattcctgggtcagctaattctggtgccttatcagttttcggttcgatttggctcggatcaaagtccctggaacttgcttgtggatttgttttataaaaatgttccatagataaatgccaaatctgtggttcattttgtacccttggtgtaacagtttttctgtttgaaccagcacccaaaaacttgctggcatcttctaaattaccaatagtagccgaaaggcctattctccgtggatttacattagctagttttgataaacgctcaattaaacaaaatgtttgtccaccacgatcacttctaagaaatgaatgaagttcatcaaccacaatatattttagaccaccaaaaagatgcggaatatccatgtgcttattgatcataaagctttcaagcgattccggcgtaatctgcaaaatacctgaaggatgcttgagtaacttgcgcttttgtgtttgagctacatccccatgccagcgccaaactggaatatccacatctgtgcataagtctatcagacgatcgtattggtcgttgatcaaagccttaagtggcgcaatatacagaacttttactgaatcttctggctcattataaatttccgacaagatcgggaaaaaggctgcttcagttttgcctgacgcagtcgaagccgacaatagcacattatgatcggtgttaaaaatttcttcggccgccgcaacctgaattggtcttaaacttttccagccatgttcatagatataatcttgaataaatggcgcataatgtgaaaaaacgtccatagtccatttccttaaatcttaaattcggtataatccttttccgcattatccgaaacagcctctgacttggtatagctgaattgatccgagttaagcagatcagtgatctttctatcaggattctgccaaacaatgtcgagcagctcaataaagtcacgaataatttcacgtggcgtgatattggtatccgctccaacacgggcatattcaatcttaataaattgagccaaatcatcatcagtaatcgtgcgctcataaccgtacaaattggcatgcatgtcagctagtttttcagtcaaaaccaacatttcttcagcggttaatggttcaagcttaattactggcgcatacatatcacgtgctccttcttgagcgaatttgcctgaagcaagtcggctgcgtaaagcttcgtatgaataaactccgcgacgacggtctttaactgcttgtggcgtaccacacataataatgcctaagtaccttgctttgccctgcaaggtatcgttgtacatggtcaaaatcttttcatagttgtactggcggctaattgcattcggaattttatagatattaaccaattcatcaatcataatcattaaaccagcatagcccgcttgtctaaagaaagtcgcaaataactttaaatattcataccaatcactatcactaataatgatatcaacgcctaattcctttttagcctcagtcttatggctatattctcctctgaaccacttgactactttagccttagtctcatcatcaccactcatataagcgtgatagtacatgttcagcaatttagcaaaatcaaatccatgaactaattcgtttaatgaagaaatgacgccatagattttctggtcaactgcttgctcaaatttaggatcatcattatttaagcctgtttcttgcgaaacttgcatctgcactgaattaatccagcgatctagaatcaaagtcaaggcaccgccttcaggcctagtcttagttgataagttctgaattaattcacggtatgttgctaaaccctgtccttttgatccttgcagccgacgttcaggtgataaatcaccatctacaacaacaaaatttttatccatcacatagttacggatcgtttgaagtaaaaagctttttcctgagccataacgacccacgataaaacgaaagcttgctccgccttcttgaataacatccacatcgtgtaatagggcctcaatctcggcctttctccccacggtaatataaggtaaccctattcttggcactaccccaccctttaatgaattaaggacagtttgcgcaattctttttggtactcttcttttttgtggcatgatttcatcccttcaaaaacatatcttttaagtcatctacataatcggtaattacttgtggttggtcctgttcgttattttctaaaaccacatcaccgaattcatcaaataatttttcattaatattatccatcaaaattgatgccattaaatggtgctgcttcaaataggtctgccaaggctgctgcatcagcaatgcagttaagaaaaacatttcattttcatctaagccatattcattatcaactttgacagtttcatctgcttgtttttctacttcttcttgcgcttctgcctgctctagctgcttttcctcatccgttaacaaactatcacgcgtcttcgaagcattggcccgaatttgatccaaatcggagaaatcaatcttaatctgatcaatctgcgcctttttttcttgaatgtgatattcagcaatccccgcgtcaattgccttaagtacagcttgatcaataaatcgcggcttaatcgaccgacctagtttaaattctgttcgcgccactctatctaattcatggagaaaattatttaaattaacccgctgacggctgatttgttgatcacaatgaatttgccattttccttggtaaaaatgatactttcttactgcatcaatctgatggtcagctacttgttgttgtcgcagataaaaaacactgcctacaaagattggcttttcaattatatcaggcttgcccacaaacgcactgtaatacgcaatgccgtattttttagcatccagcagctccagccacacgtaacgcaacagttgaacaaataacttttcattcttatacgcgtggtgctagttaaatcgttttagttaataaaaaagtccaatcttgttagactcgacttgtaaatagtaataatagaaaagagtctgatctgattgaactgccttaagcttaagcgttttagccaccatttacaagttagttttaaagatttagtgataatttgtcggcactggtatcgtttgtatgcaccggctgagtttactcatcggcgaaatattgatcaaattaaaactacggacagtctgattttggctttacttatctggcaagctaagacaggaattgaatcacaaagaagattctgtgaatgtttcaattgtttatcacactcacgttttaatcggcgttcacgtcagctattgcaattgatttatcagatacggcaagaaatgaataaaaaggttgacctgaatggacagttcttgatcattgacagctttccggtacctgtttgccaaccaattcgaaactatcgtgctaaaatttttcgcggttatgccaacattggttataaggccaccaagaaaatttacttctatggtttcaaagttcatgccattgttagcgatgacggttacattcttgattatgtcgtaacaaaggcatcagttcatgatgccagggagacagttgaactgatagaaaatacccatccatctaattactatcttcttggcgacgaaggctatttaggcaaagaactgcatcaacagctaaaacaaatgggttacgaactttggacaccatatcgtaaaaatatgacaggagctaaaaagcacaatgatcatcaattgatggctattcgcagaacaattgaaagcgacttttcgcttctgacctattacaatgccgagaacaatcgagcacgtagtctgataggctttcaaagccggttggaaattgcaattttagcttataatttggcttattgtctagaacgatttaactagcaccacgcgtattcttattaataactttagatgaattccaataagtcgttttctttgcaaagactgctgctaactcttgcgcagtaaatttttctggatggtgtaaaacctcataatcatgatcacgcttaatctcagatgcaaagcgctgcttaataatcttttcgtctaaatcataataaagaacataatctttgagccagtcttgtaaatatacatcaatactaatgtcaaattgtcgcacatatttttcttcaaattctaacagcttttcatatccatcttgtgcgtcatcaacaccaatattgttcagtaattcataaatatacgcgtggtgctagttaaatcgttttagttaataaaaaagtccaatcttgttagactcaacttgtataataatagaaaagagcctgatctgattgaactgccttaagcttaagcgttttagccaccatttacaagttagttttaaagatttagtgataatttgtcggcactggtatcgtttgtatgcaccggctgagtttactcatcggcgaaatattgatcaaattaaaactacggacagtctgattttggctttacttatctggcaagctaagacaggaattgaatcacaaagaagattctgtgaatgtttcaattgtttatcacactcacgttttaatcggcgttcacgtcagctattgcaattgatttatcagatacggcaagaaatgaataaaaaggttgacctgaatggacagttcttgatcattgacagctttccggtacctgtttgccaaccaattcgcaactatcgtgctaaaatttttcgcggttatgccaacattggttataaggccaccaagaaaatttacttctatggtttcaaagttcatgccattgttagcgatgacggttacattcttgattatgtcgtaacaaaagcatcagttcatgatgccaaggagacagttgaactgctggaaaatgcccatccatctaattactatcttcttggcgacgaaggctatttaggcaaagaactgcatcaacagctaaaacaaatgggttatgaactttggacaccatatcgtaaaaatatgacaggagctaaaaagcacaatgatcatcaattgatggctattcgcagaacaattgaaagcgacttttcgcttctgacctattacaatgccgagaacaatcgagcacgtagtctgataggctttcaaagccggttggaaattgtaattttagcttataatttggcttattgtctagaacgatttaactagcaccacgcgtataaatataaacaaaggcataggatgtactcgttttttcaaaaacatgctggcgaatcttgctgcgccaagtaaagtaacttctaagctgcccagtattcatatcatgataagttggataaaaacgcttaaaggcaaaaaattcaggataatcatcatcatagtcggccatcatcctagcctgttgataaaaattcttagctcggccacgactgggcaaaatactgtagtcataaacttctagcatctttctaattctatctggaaccagactattgttatgcttcttgcgaagattttcacttggtttaattgcttgggcttgatagcggtcatctactttatctggtgcaatataaaaatattgattctgggcgatatttacttcatcaccattcatcgccagtttaaaagcaaaatcaagtgcttttttgagtgaatcttcactaactttttctaatattgccccaacccaatctgccgccttgatcttcattggatcagtgaagccaggcaaatctcttattagtgcagccattgcaccacatttcaggtccaatatactctgaccttgcccacgtgataatatcgcaaaataaccactatcaactggtgacattaaaacgtaaacgctagtggaacctggtacagcaggcttaaatttcaaaccatatttggcatagacatatttgaagagttgatttgaatccattttgtctcctttttttcgcacgtacgttcattatatcatcgatttattttttaccaaagtcacgcatgtcagctcctcatgtacatttttaagtttcataaattttatatttttatatttgtgtggttattaacaaacaattatgttactatagtttatgtaagttattgaaagcgtttttataaaagcttcctagagaggacaaaaacttaatatgagtacaaaagaacgttattctcaagatgaattaagaaaagataatccaatgtttagccgcactcgtgccactattgaaagtgcattttacggcaacaatgtccacgaagtaaccagtgttgcagaagcttataacttagctaagaagcaatcaggcgttattgttactgacttgccaatcttacacactaaggaattaggtttgccacatggcgcaacccaattggtttacaaccacggcaagattttaggtagaactgctagcgcccgtcactttgttgacaatcctaatgaagatgctgaagcattggacggcaacctacgtgaagatatttacaaggggcatgaacaaaagtacttaaaggctactgttttagtaggtcttgacccatcattcactgttaaggctcacattatgatgccagaagatcaagccttcaaccttctttcatacatcctcaacttccacttcttcgacgatgaagctgaaaaattatacgaaaagtcaaagttctacgatgaaccagacatttacttctacttcgatccaaatgttcaagacgaagattaccctaagggcttaggcgtgtttgacgctccacataactgtgccgctgtatttaaccttcgctacttcggtgaattgaagaagggtaccttaaccttagcttgggctatcgctcaccgtcacggctacactgcttgtcacggtggtgaaaagtcattccactttgacgataaagacgacaagacctttgcattctacggcttatcaggttcaggtaagtcaactttgactcacgaaatgtacgatggtaaatatgacatcactgttttacacgatgatgccttcattatttcacgtgaagacggttcttcagtagccttagagccttcatactttgacaagactcacgactacccagctggccaccacgagactaaatactacaccactattatgaactgtgatgtaactttagacaaagacggcaagaaagtcatcgtaactgaagacttacgtaacaacaacggtcgtgttatcaagacccgctacactagtcctcaccgtgtagactttgaaaagtcaccaattactgcattgttctggattatgaaggacggttcattacctccaatcatcaagatcgatgacccagtattggcaactactatgggttgtactttagcaaccaagcgtacttcagctgaaaacttacctaagggctttgacatgaatactttggttattgaaccattcgcagacccattcagagcttacccagtttcaggtgactacagagacttcaaggaattgttcactaagcgtggtgctagttgctacagcttgaacaccgacgcatttatgggtaaagacattcctaaggaagttactaagaagttaattgaagacttagctaacggcaatatcaaagacagtgacttcaagccatttggtaacttcaagggtgtatcatacttacctattgaaggctacgaagttcaccttgaagacccagaataccaaaagaccttgaaggatagaatgcaagatcgtttgaactggctcaacaagtacgatgaagaacacccagaaactccaattcaagatgaagctaagaagaccttggaagctatcatcaaggaattgagctaatattaaggaaatgaattagtgtctcattcaattaaaatttaatttcttaatgacgaaaagacgagagttgaaattcagctcccgtcttttttattgctcaatgtaattttgcttctgtagtttggcatctatcagtttataaacttgcactttattctcttgtgcaagttgtggattatagttatgtgctatttcaatgacaatagccggcaattggtagattatcttatgaatggcatcactatttttagggtctaaacttgaacaaatctcatcaagcaaatatatcttcttagaacgaattagacctctaactaaagcaagtcgttgtgcctgaccacctgataaattgttcgcgtcatctgaaattaatttatctaaaaaatcattgccaaactcatgaatcagtcccatcttttttgcttcatgaagcattagatcatcaggtatgttttgcagaagtgatagattctccctcactgtaccttggaataaccagattctttgcgagatcttgatgaaatcggcaggattaatttgatgaccagcaaaggtgatttcaccgttatacttcagattattagcaatacaattaattaatgtacttttcccaatgcctgaagccccagtaacaatgatcttgtcatgatcacgcaaagttaaatttataccatctaaaattttcttatcaccatatgaaaaagacaaatcttttattttcaaaatagcttgagagtcatgattatcttgtttaacactttcactttcttcaaaattatagctttttatttttctaattgcatcggtgctatgaatttgagtctgatacaaagcaattgttcttagatatcccacaaccctatcagctgacaaacttaaagttataatggccgctaccgttacgttaaaccagcctctctgcataaaaagcaagccaataaaaattggtagcaatagtgtaactaaagagattaaccatgcaatgaattgtacctggaattgacaattattcatcttacgatatttgtcttcctcattaaccaagattcgatcaaatcgtttaaagaaaagatgtctgacaccaaaattcagtatttctaagcgtccttcaaatatatccttcattgcctgaatcaactgtgagttagatttattccatttttcggttttctcattcatcctcttcttgccaatatagcttggaatcagggttagcgctgaaagaagcaaataaataattcccaaaatcagattagtttctacaacaactattgccgatgcaaccacattaaatacaaactgaactatgtcagttatcccaaagaaatatttttgttcaatttctttagcagtaccactaatcgaattgattacatctgctcctcttgcttgcttcatgtctgaattagcaaatttagaataaaaatattcttgctttaaagcaatatttaatagcatcacaattctattttgaaccaaataaaacaagagcatggctatgtagactatcagatatgcgccaaaggctaagccaataaatttataaacgtggtcaatgttactaaaattgatattagttaattgtccaaacagtacagcatttaataccccttcaaatgctgaaatggccgataaaaccagaaaaactatttgtaaatatattggaacatgttttactacccatttaaaatttatttgttgtgtgttcattgtttaatacccacatatttctcataatcaacaagccaatcttcatcatttttataagaatgattcatacactttttaaacccaattgctttaaatcatcttcatctttagtttctaacaattgtcgctcttctagagacaagtgatacttattcactaaggcatcaatattctccaaagaaatatttttaccatcagaaagatcctttcttcataccttcagacattactatacctcctattttctctcgttaagtaatgcataattttcaacttgcaatttactgtgtatgggattgatatcaatgcttcccataattccccaaatgcttataataataacagtaagtattctcttattttttaatttcaaagccaggaattcattatgtacggtcaaaaatttaaagcacttcgtcttcaacaacatatttcactagagcaagctgctaacagagttatctctccatcgactttatccagatgggagaataataagattgatattcgcttcaatttagttattaagcttttagacaatattcatataaacctaaaagagtttactaattactgcaaaattaatcatagtaatccatttgttgcgaaagtggctatgtactatgaagccaacgatgatcgtcatattttgcaattaatacaaagcaagaaaaaagaataccaaaattcacataatcaatttgatttacttctactagctatcgcatgtaattgttattacgatctaactgataacaatgttttcccagtgagctatcaaaagaaattattctacattttatctaacattgaatattggacagagatgtacatcaatgtttttggtaacactgtttttctctatgacagcaaggaactatatagtatttcaatcagaattcttaaaaatttaaattctaatacatttaatgattttcaagaatattattatgctttatcctctgtcatcaacgccctaaccgctctaattatcaaaaatcccaaattagcatcacagcttttaactaaaatagagaaagtttcaattcctaaaccaatctcttacttaaaaattagaactaatgtcctcaagtatcttttagattaccgtttaggcaaaacagatgaaaagcttatctcaattaagctagaaaatttaaagtggttaggattaacagatattgcaaaagacttaactttcttctttaaccgtataaaaaatgatcgttcacctctttcctaattcatttgcctattatattaccctcatttttatctaattgatttttctttgcaaatatgcaaaattatttttagcaagaataaaaaagcctattaaatctaggtgtttacaaaccctgatttaataggtcttttatgcgtcttttttattgctcaatgtaattttgcgccttagttaaaatatccatcttctcatgttcagttaaatacttttgtgcttctgccaaattgacccatttactagctaaaatttcttctttttgaatgttaacctcttgtcctgcaacatagctagcaacaaaataaactactgtcttagctttatcaacagtcaactgatattctgttttttctctaaaagtaaagtcaaaattcggctttaaaccaacttcttcaaaaacttctcttctagcagcttcctcagctgtctcattattttctaaatggccttttggaaagccccaattatgatttacgacgctctgcacgatcaaatatttcagctcgccgcttctacgttctctgtaaataactgcacctgcagaatgttccatcttcatttttgtcacccaacctttatattgcataattattaaatatttattaacgtatgtcaagcaattgtaatcaaaaaaatgaccagatctttgacgatctagtcactttattcgcagacgaaattattaagttctattggtagaatattttaagttacttcttcaagttcttttcgcagtattccttgaccttgtcatcatcggccttaagaatccattcaactgcagcctcagtcttcatggtgtctcgaccatttacttccatttcgtggtcccaaatagcgtcacgaataggcatttcattacccttagcccagtcaaaaacttgatccatatttctatcaattaatgcagtttcttcaatttcttttgcatctgccataattaaaagcttcctttctgataacgactttattgtagttctattagctacaactgttaacaaaaagggacttttttatttaaattctaatttttgccattaactgcttcatcagccttattcactacactaaccgcattaagtgaacgaggataaccaatgaatggtacgttttgttcaatgaccttcatcaagaattccttgtcattgcctaatttgatatttgcttgagcatgggccatcaattgaggttcacagccaccttgagctgcaatataacagaaggtaatcatttcacagtcattgtcatccaagccttttctagtgtagtaatcgccaaagcaattatcaactaaccacttattgattgttcccttcttggcaaaacccttcatttgtggaccaaacaagcgcatttgagtttcctcacccttttcaaggcgattgtctagtgtagtagttgcttgacccgcaagaggtaattcaacgccgcgcttagttaaaacatcattagtaatcttgaaaaatggggaaactctacccaaacctaaataatcaaccgcttgatataaacttccttagcttcaactgggttaacaccattgtctagtacgactggaagcattatttcatattcttccttgccttgcatccccaacaaataagctaaagttgacaacatcttagtccggtcgggcaaatcaacgtctttttgcacttcgtcaaaagcaaaatgattaattctttccaaagcttctggatcagtagccttcaataagttggcatgtactctttatgcatcttctttaattgacataataaattcctttctaaacgcttatctctactatttatttaagtacgattgagtctaaaagaaaaatatctattttttattctgcaatataacttattcttatcaaaaaaatgtgtctgggaaaaaactagcttccagatgaataaaaacgatcaagatttccttttttaagaatcttgatcgtttttttgttctctttaaaatttttaacaataaaaatcggcccttcagccaccttctttgacaatatttgttcaaattcatcatcataaaggcaattccgatatcggtttcgaccttctctttacctcgcaggtgcgttctgcgcatgccaaatacgttcttcaaatgtccgaaaactggctctacatcatattttctcatgccatagatgtgtctgccttcttcgctttggagaacttcttttgctttttcttttaaatattgccagttaggattatagcgaacttggcgctggcggccgctagctgttttagccaattgttccaattctggcgttagctggaactcgtctgcctcataaaccttaaaatcacggacctgaccagtagaacgatccttacgctggctgtaatatttgaaattgaatctgacgccatgatgatcaatgtaataatcatctttttcattgtagtaccagttgattagcttagttggatcattcttatactttctggtctgttctttttcatacatagtgtagggaataaagtacttcttgtctggatatttttcctccagcatcgaataattgtattcactgccatagccagcatcggcgacgattttgtcaaacttgtccaacacggtcatttgatccaaaaccggctccaaagttttgaaatctgtcggattaggaaagatggcataatcaactacatattgatcggtcgtgactgcttgaatattgtagccaggctttaattgaccatttttcatgtggtcttccttcatatgcataaaggtggcgtcatgatctgttttggaataactgttgcgtccggcaaagatctcttcggcttcttcatatttttgcattcttggcacataatcttttcttagccggtgcagaatcttttttagtccacgtcgcttggcttttcgaggtgaaccgccaggaatggctttgttttcctgctcaatctctttagtcagcttgttaatttctgcttcagtttcttgagctaattcctttagcccctgactagtttgaactttttctttttccatttctttgactacttctttagtaatcaattcatcataaagttcaactgcctggcctttcagcttttcatgatacttttcaaccgctttgcgccagacaaatgtatagcggttagcatcagcttcaatcttagtaccatcgataaaagcagcaccttcattgattaagccttcatcttctaacaggttagtgaagtagataaagctctttttaatcagttcattggcatggctgcttgatctaaaattattgatagtatgatatgaaatcttttgctggtcagccaagatcatcattggcagattttcttccagcatcaactcaatctttctgccagaaaaaactcttctggagtaagcaaaaagcagtattttgagcatcatggctggatgataggctgggcggcccgttttagcagtcttgcctactaaaacatcttctggaattgaatctacaaaccagctgatgacattagccaaatgattggccggaatggcaaaatctagattaagtgttaaagcagtttgacctgtgatataattcttgtacatgttagtttccaccttttttattttgtgatgatttaataatatcaaggctggagctaaaagtatacaaaaagagcgttgaaacaaaaaattcaacgttcttttttcatgatctgagacttagttttttcccagacacatttctattaggttatttaattagtttttcttgtctgcttcagcatcatggtatgacttaacgatttcatcaactaattctggatcatctttcaaatcagtagtttctacaatgacatccttcaagtcttcatctttaagcatttgcatcaacttaacgctttccttgtcgttaggttcatcaaagtgataaattctaccaacagtttccatcaatgcactgtagtccaaacctctgtccttcaattcacggattggacggataaatctttcattgtagcctaacttacggattggagttctaccaacacgagcaatatcatctgaaatatatgggttttggaatctgctcaaaatcttgttgtggtattcttccaaactttcttcggtgaattccttgttccacttgtggtaaagaagtgaacgggtttcactcaagacacgcttaacttgctttaaaacaaatggatccttaatagcatccccaatagtgtcatagccaaggctcttgccagtataagcaacagttgcgtgtcccgtgttaactgagaataactttctttcgatgtaaggttcaaggtctggtgcatagtcaacgccctttaacttgatatccttgttcttcatttggctttcgtcaataacccattccttgaagtcctcaactgagacaaacaatggatcgtcattatgttggataggaacaattctgtctacagctgcgttagggaagccaatgtacttgtctagttcaggcttaacgtcatcgtccaagtgcttataaacttcttcttttaagtgttctgaaccgccaatcatgttttcacaagcaatcacatcaagtggagtagtgttgcctgattgaattctagcagttaatcctttggcaattaatggagcaatgattgccaaaatctttggaccaatggcggtagttatcatatcggttgatttaattgcttcaactaccttgtctggatccttagcattgttaattccatcaacatttgaaacatgaattctcttcttaccaggtgcggctaattcaatgtcatattcaccacgcttgtttaattcatcaataatagtttcattaacatcaacgaagtcaatgccaaaaccattatctgctaaagtttcaccaataaatccacgaccaatattacctgcgccaaaatgtactgctctcatgtttaatctcctacgttctttaataaatcaataatttcttctggtgtttgtgcgtctgcaagctttgcaacgttggaaacatcactacagaaaatagcaatctgtgacaaaatatttaagtgttcattgttcaaaccagcaatcccaaagacaacggttaccaattgctcggtatcatccttagggtcactaaaatcaacgcccattggaatttggactaccgaaattccagtttttttaatgtgcttcttaccttcgtcagttccgtgagggatggcgatgaaattacccatataagtcgacacatcttcattacgggcaagcattgaatcaatatactctggttcgacacagccgccatcaactaataattgaccggccattctaattgcttgatcccgcgttggtacgtcttgattaagtttgatcatttttggatctaattgtaatgccatttagctcatccctttctaattcaacttttgaatagcttcgccaagctttttatctttaagtaaatcatcaacaactagggtttgaatatcactgtatctgacagccaagttcttattagcagctggagtaacaattactaagtgacttggatcatcagtcaattcgttgattcttactgccttaacaggagtagtcttaccagccttcttaattgcgtcattgaataaactagttgccatagtagcggtacctaagtgttgatcgtgacggatgaagtccacttctttaactttactgaagtcgattccttcaagtgaaccaaccttcttaactggtttttcagcctttggcttatcttctacttgagttaaagctttgaagctagctacgattgtgtcatatttcggactactcaagaagttgccaaccgccacgtgcattgcatgtggagtcttttgtaaagcgcggtcagctaattcttcttgcgtgatgatcaacaaaccatcttcatctttcaagtttctaacagcggtattggttactgaaaccttaatgccagccttcttgaatttatcacgcaaaagtgaagcacccatagcagatgaacccatacctgcgtcacaagcaaagataattttcttaacattggcatatgacttaactgattcatgtgcatcttcagcttccggcattgattgacctttagattgggccttcatggcttgcatttgggcttgttttgcttctaactcatcaccagtactcttgtcgtttttaagaataattgcggcaataatgaatgaaacaactgcggcgccaagaacaccaacaatattaccgaaataagcatcctttgcggaaacaagcaagatagctaaaattgaaccaggtgaagcagctgcttttaatccaccaccaagagtagtgaataagaaagtaccagtaacaccaccaccaatagcggctaaaatcaatgatggtttcattaatacatatgggaagtaaatttcatgaaccccaccaaagaattcaatgatggcagcaccaggagctgagctctttgacttacccttgccaaataaagtaaaggcaagcaagattccaagtcctggacctgggtttgattccattaagaacaaaactgacttaccaacttgtgcagcttgttggatacctaatggaactaagatcccgttaccaatagcgttgttcaagaacaaaactttggcaggttcaataatgatgttggctaatggtagtaagtgaactctaataattgcatttactcctgcactagcccattgactgccaacttccataatcggtccaatgataaagaaggcgaaaatcgcagcgatcatgcctagaataccaagtgaaaagttattgtagatcatttcaaaaccagatttaatcttgtcctggaatacttgatctagtttcttcaataaccatgcactaagcggacccataatcatggcacctaagaacattggttgatcagtaccaacaattacacctaatgtaccgattgcaccagcaatggcaccacgttcttcataaaccatgcgaccacctgtataaccaattaacagtggcaacaggtaatgaagcattggttgaactaagttattaatttctttgttagggaaccaaccgtgtggatacataaagaatgcagcggtaagtccccaagcgataatggcagctttattcggcatgatcataccggataaagctgtaccaaatttttgaaccttcactttaacagaagatttactttttgcttgagccattttcttcttcctctctcatcaacttacatttttattctaagtcaatcagtaagcgcttacaatgaaatgaaaatagaactctggcacacttttgtgccagagtctgagtttacctattctattaagcttttgaactattggttacctagtaaccgatctttgaggtcttgtaaaaaaagtgccgcaattgcttctttaatttctttttgactgccatttgtaaataaatctaagttttgactagacatgataatcatgctggaaatagtactcattacccgctgttcgggtgcagtaagattgtctggtgccagcatcaaaagaactcttttgacttgaatggtatcatgatccattgattggagcgagatttcattatctaagtcaaacatggtaaatgaacagcgtgtaatttctggactacgtgtgtgtagcaatgcgatatggctgttagggatgccaactggtgccattcgtacacgtttgagaagatttttggcaacgggcatttgcttacgaattagtgttgaatccgaatgggctaaacattcctgaattactgcaattaagtcttgcgaattgtattccagttgttgaatcttgattccgttgactagctccgagcaaaataatgtactaatcgatagcttagcaagttgttcgactgaatggggatgtttttcttcaactacctgtttagctggaactggttgaggatatttttgttcataatcttttaagtaagcgcggatttttattaattcatcatcaagcagtaatggactaacaagtaaataatctcttgagaagcccttcaatctcaaggttgaaaaaataagattgtaatttgacaagtctatttgatttaaggcagaaacacggctggttttgacttctttgatttcagaaaattctctttttagtttggcacctaagattgccgacgttccaatgccattttcacaaattactagggccgataaattacgctgctgattgcgactcgtgtattcattggcaaaataaagcaagatcaactgcaactctgacgctgtcaaataattttctggaaacgctaaatgccaatatttttgaatagctagatataaatcaggaaacttttgactaaggcctgccagaatttcaataggtgtatctggtaaaagagctactttatgttgtactaaaccaataacgtgtttcgtcactttagtcataaaactatgatctttttgaaaatcccaatgcatttcttcagaaacgtgttgaacgaattcttttactttgactgagattgctaattcgcgctcattataagtcaagtaagtgttgtgataatcacatgataataacttattagctaagtatgagacatcattttggtcaacctcaacttgccgcttttgcgcaaacaaggccataaaacggtaaacataaccctgatatttaagtgaatcagcactggggtggataaaatctagcttgcatcccgccagagttctttttatcgttaccgcaaaagttaaaattaactcaatcagcttttggtcactgtctagcttaattttaccaaacacgctttttttaagacaatcagcaacctctactagcaaagccttatcaatcattgtcaaaaacatgtctttgcttgtcgtttcattatgcagatacttaaaaaagttatattcattgatctgattgagcataatatcaactaaaacctgacgccgtattttttcaggcgcctgaattaacagtcccacaccctttttgcggatcaagtcaatatgatatcgttttagcgacctttcaaccgtattcaaatcactttgaatcgttgcttcactgacattcaggtcaagcgcaaattgaataattttacatggctccgtacttaaaagcaacttagctgcaattatcttctctcttttagctaccgaaattacattttgactgtgagattgttgcacagattgcttaatttcttgtaattgctttgaatcgccagataaaaaatattttcctttttgattttcaattttaaagtcgttcttctttaaatcgccaaattcgcgataaaccgtccggcggctgatctttagactctcttcaatttgtttgatacttaccccactcggatttcccaacaaaatttgaagaatgtgcttttgccgttgtgttaaaaacatcccatcatcctcgcttacgtttaagtttattatacttgaacgcaaaaaaagaagacagatctcaaatctgccttcttgaggatatttatttacatattaattattcaacagtaacactcttagcaaggttacgtggcttgtcaacatccaaacccttatcctttgaagcgtagtaggcaagaagttgagttggaactactgtcaaaagtgctgacatgtagtaattaatttctggcaacacgatcgtgtcatcactatttgcgaattccttgcctacaatagtaattactgaagcaccacgtgaagcaacttcttgaatattaccacgagtaagatctgcagtaactggatcgttaatcaaggcaataactggagtgccatcttcgatcaaggaaatggtaccgtgcttaagttcagctgcagcaaagccttcagtttgaatgtatgaaacttccttcaacttcaaagcaccttcaagtgcaacagcgtgatcaataccacgaccaatgtagaatgcgtttcttgattttacaatatattgatcagctaattccttaagcttttctttaccgtcaacaatttgttggataccttcagcagcgatggctaaatcatgttgtaagtcccaatccttagcatcttgattaccaagtttttcaccaagtgccttagctaaaatagcttgtaaggcaacttgtgcagtgtaagccttagttgaagcaacggcaatttcaggacctgcacctaaaagcattgtgtagttagcttcacgtgataaagttgagccttcaacgttagtcatagtcaaacttggaataccacgcttgttagcttccttcaataccacgcgtgagtcagcagtttcacctgattgagtcaagaaaataaagaatgggtgcttgctcatcattgggaagtggtaaccagcttctgaagcgtaaccaacttcggtaggaataccagtgtagtgttcaaaaatagttttaccaactaaacctgcatgataactagtacctgcagcaaagatataaaggcgatcagccttagaaatagcatcaataatatcttgatctacctttggttcaccattttcgtcaaggtagttttgtgacatgtgacgcattacgcctggttgttcatcgatttcttttaacatgtagaattcgtaagtaccctttgaagctgcgttagggtcgatgttcaaaacgtgaggttcacggtctacctttttgccatcaacagtttcaatagtgtaagaatccttggtaatgtcaccaacatcaccatcttgcaagtcaacaaaagtcttagtttggtcaagaacagaaatagcatctgaagcaatgatgttaaagccatcaccgattcccagcatcattggtgacttgttcttagcaataaatacgtggtctggttctgtgttgtcaacaagcaagaaagcatatgaacccttaaccaacttcaaagcttccttaaatgctgaaaaagcgtctaagttcttatcacgtgcaattttaccgatcaattgaacaactacttcagtatcagtatctgagtggaacttaaccccttgcaagtacttttcctttaattctgtgtagttttcaatcacaccattgtgaactagatagaaacgcttggtttcatcaaaatgagggtgagcgttatctacagttggcttaccgtgggttgcccaacgagtatgaccaataccaactaaaccttgttcatctggagtcaacttttccttcaagttagaaatacgaccaacagccttagttaagtattcgttaccatttaaatcatttaagtaaatgccagctgaatcgtaaccacgatattccaagttggttaatccatttaaaataatatctcttgcaggcttacctacaactccgacaattccacacataattttctcctttggtctagtttgctttgaagtaatggactagcttatttttattgttacagtaggtataatagtctttttgcaaaaatcggtcaagtacaaatattcaaaattggtattataattttaagcataaaaaatggctaccagaatttgctccgatagccatttttacttaagtcaattttaacttttattacttgtttttgatacccttaccttcatagcagtctctcatcaattgagaaatttgactaattaatggagctgatgggttagtaacagtgttttggtcgccataagcttcaacagctaattggtccaccttcttgtcaaactcagccttatcaacgccataatccttgaaggccatcttaataccaactgattcagccaaatcaataattttctgaactaatttttcaattaattcagcatcacttgaaccagttaagccgattgctctagcaatttcagcatagtcgctttcagcacggtaaactgagtaatgtggccacatagcaagtttttctggacgcttagcattaaagcgaatgacttgtggcaaagcaattgcgtcactgacgccacttggaatatcaaaagttgaacctacggtatgagcaattgagtgttccaagccaaggaaggcatttgaataagccattccagcaatcgtagctgcatcatgcattctctttctagcatcaagatcgccatcgtaagacttcttcaagttagcgaaaattgctttaatagcttcaagtgaccaaccacgagtgaagtcagttgccatggttgaaacataactttcaattgcgtgacctaatgcttcaaaacctgaccaagcaattaaacgtttgggcagcgtttgcacaaattgatcatcaacaattgaaacatcaggtgttaaagcatagtcacataaggtatgtttaattccagttttggcatcggaaataatagcaattggggaaacttctgaaccggtacctgaagtagttggaatacatacaagttggacaccattaatctttgggaaacggactactctttttctaatgtctaagaatttttggtaagcctcttcaaaactcatttctgggttttcgtagaataagcgcattgctttagcagcgtccattactgaaccaccaccgatagcaattacaacgtctggcttgaagatgttcattctgtgaacaccatccttgatcacatcagtattaggatcaagagttacagccttaaagacttcatattctttttgacctaaacgcttagaaatgatatcagtaacttcatcagcaaagccttggtcagctacaccttcatcagttacgatgaagaaacggttaacgtttggcatgtgacgaaggtagttagcagcgttatgttcgaagtaagtctttgatggtacctttacccattgcatgttatcacggcgtctagccactgttttgatgtttaacaagtccttagcaccaatgttgtgtgagaaggtattggcaccatatgaaccagtacccaaggtaagtgatggcaacatattgttgtaaaggtcaccgataccaccgagtgcagctggtgagttgactaagatacggcaagcatccatcttcatggcaaattcatcaataatcttcttgtcatttgagtgaagaccagcggtgtgacctcgaccaccatagttcaataaatcggtacaaatcttaaatgcatcgtcatggttcttagcacggtacaaagtgaagactggtgaaagcttttcagctgatagtgggaagtttctacctacgcctttatattcagcgataattactttagttgtctttggcacatccacaccacaaagcttggcaatttcataagctgacttaccagctactggaccagcaaccgtaccacgacgaggatcaataaagtgttcctcaaacttcttaatttctcctttgtttaagaagtagcagttccacttcttaaattcttctttaactttgtcataaatttcagtatcaacgacaactgaattttcagaagcacaaaccataccgttatcaaagttctttgataaaacaatgtcataaactgcacggtcaatattagcagtcttttcaatgtaagaaggaccattaccaggaccaacaccaatagctggcttgcctgatgaataagcagctttaaccatacctggaccaccagttgccaaaatagtttgaacacctgggttagtcatcaaatcggtcgttgcatcaaggcttggttcttcaatccattgaacggcatccgcaggagcacctgcagcaacagcagccgcacgaatgattttaccagtttctacacaacatttttgagcctgtgggtggaaaccaaagataatggtatttctcgtcttcaaagcaagcattgccttgaaaataacagttgaagttgggttagttactggagtaacacctgcaataacacctttaggttcagcaatcttagtcaaacctaattccttgtcttcttcaatatacgccgacggtcttttcgtgacgcaaactgttccagatattttctgaagcatacatattcttggtagttttatcttcaactacaccacgtttagtttcttcaacagccattttagctagtgggtaagcattttgttcacctgcagtagcaactgcttcacagatcttatcaacttgttcttgtgtgaagttagccatttgatctaaagcgacatgtgatttctttactaagttatcgaccatgtcgtagatttgctttttcttttcgtcctctgtaagagtctctttttgttgtgtcttagccattgtattattacctctaagatctactaattcttgtgaactaatttacaatgtcaactatagcacaataactttatttgtaaatgcatgaatttatgaaaatagtgaattaacaaagattcacatttcctcataatttcgctctaatgcaaatgaaagctattccttaattatttgtttgtgaattaacaaacttatttttaaaaaacagatttttgatatttttttaaatctaactatagagtctggtcatactaattgataatgataaaatattaagtatatgtgaaaagattgagaacattggggggcttatatgagtgagaaaaaaacacagaccgcttctggttataaacgaaccctaagcaatgcacacattcagttaattgctttaggtggaacaattgggaccggcctttttctgggggttggagacagtattcaccgcgccggtcctagcgttatcctgatatatattattgtcggtatcttcctcttcctgctaatgcgggcactgggagaactaattatgtccgacttgaacaagcacacatatattgattttattgaacaatatttgggtaaaaatattggctttatcacaggctatttgtattggttaagttggattaccttgggtatggccgaaaccacggccctaggaatttacttcaagtattggtttccaacactgaaaccttggattccaggaattattaccattgtgatcttgctgttaatcaatttaatttcagctcgtgtctttggcaacttggaattcagttttgccattatcaaaattgtcacgattattgccttcgtcatcttgatcctttacttactagtaactggtggcaaaaccagctttggtcctgttagctttgctaaccttgacgatcatggcggcttcttcgcccgtggcagtaaaggattcttacaaggatttcaaatggtaatcttcagctttattggagttgaattaattggtttaaccgcggctgaagcacaaaagccagagacaacgttgaagcgagcaatcaatcaattaccaattcgaattattttgttctatgtcatggctattttaggaattttgttagtaattccatggtccaaagttgctactaacgctagtccatttgttgaggccttaggtgctactggtattaaaaatgctagttctattattaattttgtagttatttcagccgccgtctcatcaactaacagttttttgtatagtgctggtcgattacttttctctgttacttttgacggtaaaggaaaatggaataaaacttttggacatttatcaagaaggcagcttccacaaaatgcattgactttatccgcattattgatgggatgtgcaccactaatcaccttggttattggcgatcaggcctttaattttatctcatcaacttcaactagtatgtttttaatcatctggagtttgatgattttaactcacatggcttacaggagaaaaacagcagctaatcagctaaacgattttcaaatgccaggttacccttatatcgattatgtaatcttgtcattcttcgttttaatgattatcctgctattgattttaccaagctaccgagtaccaatggtcgctgcaattgcaatctttattgttttatacatcattttcaaaatttggagtaatgaaaaagctgtttaaagcaaaaagtcgagttttttagctcgaccttttattttgcaatttttttaattattttagcaggatttccggcaactaccgtattagctggcacatctttggttacaacggcattagccgctacaacggcgtttttacctaccgtaacgccaggcaatatcgttgctttagcgccaatccaggcgttttgtttgataacaactggctttaattccagttcttttctatgctgtggatccagcttgtgattaactgaaatcaggtaggctccaggcccaatcaacacatcgttctcaattgtaatcccgcctaagtcgaccatcatcacattggcattaataaacacgcgctcgcctaatttgatgttgtgcccataatcagaataaaatggtaaccgaatctctatactagcagctattttttgaccaaattaagatactataatataggtcatcatagacagtaagcacgcattttttatttgttgaatcatcataaatcaaaaatagtaataagcttttttccgtaaattttccgcaaattacgtaaaaacagaaatgggaagaaccaactcggttcctccctttttctgtattcgcaatgaatagtcgtgcagtaatataaatatattataccacaagaaaaaaagccccacgaaattaaccgtggagcaaacatcaatataaatcaaaaggttcaaaatttgatgttatctcagaagagatgttaaaaattatatcatgagtaaaataaaaaagccaccctgggatttctcccaaggtggctttcttgatagatttagaggagtatttcacccctcttcttttatatttcaataggcaatttgattataacacttttctaggatcttttttaccagtagcatgttccataccctcagtggtaacaacccattgctttccaaacttacgcactgttccttctggaaacttttgaggtgactgactaatggtctttctaacatagctctctgatacgccccagattcttgctgcttcttttgcttccataatatctggactatttaagttaatcactagaatgcacttcctatcattttaattagtaatcctaatagaatagcaactacactccaagctaaataacgatgcattttttgtttgtgtgtcatggtataattagatatgtcaaagagaggagcctctcggattccctctttaaagcttacttgtgtttgacaagtgttagaactattcgccctagttgtttgataagttcgtaggctggatagctccaagctccgatcatcgcatacttagcgatcttttcggaagtctcatcacgagtgggctttttctttttgccttttttctttgacatatctttacctcctttcacttattataatatcacgatatcgggataaatgcaataaaaaaataaaattaactaaaatatatttattttgaacataaaaaaagctcttgtgacagcagatcagcaagagccaagcaccgactagacggctagacacatgcccaaagtaaccagctttggggctttaaacgaaagtgtatcctttcatgtccataacagcttttatggctactactttttcaagtattttagccactgtaattgcttcatggattattaaaaagttcatgaagtaaaaccaggagagcaagcggataataccactactctttttattataccataacacaaaaaagagccgctccaggaaaaatctcccagagcggctcttgcggcatttggagtgttcttcacactcctttttatatttcaatcattattactatagcacgatgtaggcacgattgcctgtgacgtagacggtcttgccattgtgcttttctttgatacgtaggaatctgccgacacgcccttgaatctcaacttttgagttaagttccaagccgtagactttcccagcgtctgcctttggtgcatctaaggcgtgagtatgtggcatcacgatcttggcaacgccatgtttggcatcgttgtatgcgatcgggttagtcttgacatagacggcacgaccatcgaagtattggttcttgccaaccttgacagcgccgttttcaaagcctagcacctgccagacagaaccacaaggttttagcttgtcactttcacgcttgtctagctttgagctggtataaacatatgcaccttttgagttgcttactacggcaacagcgccaatattccacttgactacgggatgctgagagggcgattctacggtcttgtttaccttttttggtgattgattacccgaactgatctttaaatcgactagggtaatattgccatcaacgccaagaccacggtagttatcagtaaactgccagattgctacgccgtccatagatgggaaatagttaaaatcagctgaatcttgacgacccatgaccttatatgaggctacccagagacaagttccgaatgatttaacaattcggctggtgctcaaatgatttcgtaaattgaaagcacctgaatagacaagtggcttgtatcctgcttctttgattacctgcattgcggcaagaacagcatcggtgttggcactagcaccgccattgactgaattgccagaaccttcttcccagtcgtcagcgatgtagctaccagctgggactccgtaagccttagccttttcaacggcatacttagcttctgcccgtgctcgtgtgaccgagccggaatggttggcatagaaatagcccatggttagcaagccatgagcctttgcagatttaatttgcgcttttgctttcgggttgatgtatccagtaccttgcgtaagctttacgatagcaaatttcgcacccgtgtagctaacgttttctttctggaagctggctacgtccacaccatagcttttctttgatacgattgagcttgacatctttttcaccgcctttcgtttggttttcaaacgatttgtcaaacgattcaaaaacgtactcgttatacgtcttagttcttgtcatcattgtcgtcacctgatacaaagccaattggttgggcgttggtatcttgtgtatcctcttgtttggcttggtccgctgtcatttggtcataagcatgttggacagcacccttggcgactgtttcggtcactggcttgttttcttgcttggcttgatcaagtaaggcttgtacagccttgaccttcttttcggcaccagaaatatccagcgttgcggcttcgcttacgacaaacttagcaatctcatcaatggtcattacttgctttggaagtggtttagccgactttttggcaaagtattcgatactagtagagataccgatacagatagccacgatagccaaaacaactatttgtgtgtaagcagttaattcagtgagattcattattgggtcaccttcttagtagtaagtacgccgctagtgatgtcgcccgtcttagcaggggtgtagcctactggcttatcctctaccgctggcttggttgcgtctgggtccttgaccatggtttcgtcttggatacctgacaaatagcgcacccacttggtaactgcacctttgatgtcttgtggcacatcgtccaaggttaaaacaccatcttgcacaagagtggtgtagtctaaaattctagtgtttggtttcattttcggataactcctttcgcaatttttcgttttccctgcgtaattccttattttctttaactacagcctcatagtcgtctactaaaaagctatggctgtcttgtctcgtatttctcttatcacttagatatgaagtaaacaaccccaacaggaatggagctagtacactaagtacgtctttaagaccttgcaagtgtatcagctcctttctcagtcctgtgggtcatactcataagcaatctgcataaggttaatgattgcgtagatctcaaaaacaatagcagggtggaatctgaaatagccggctccaacgatgtgaaagctttccgcaaccagcagaactgtcaagaatgctactgacacgcctagaccaactttgatgattaactgtacccgaatatcaaaaacaccgcacaaaatcaaaattagtcctgccatcaagccgatactatcgacccagacgttattccacgcaggtgctagacttggtgggtaaaaaaagtaggttcgatctatcagaaagcagaccgccaatgccgagattaacagccctgttttgatgaaattccagcgactaagcttgtggtgcaggttgagcttgcggtgcaacatagtcttcacctgtgactttcttgtaacctgctgcgtccaataagccttgttgaactaagccttgaaagtaaggcttttggaaaagccccatttgatagtcaagtacccacatttgtaaaaataaagcgtttaaatcagtcataattagttacctccgttttcttgcttgttagtgttttctgctggcttagtgtcactggttggtgtagcagtcttagcttgatctgcttgcatgccaaccagaatttgttgcattgaagccataaccttgttggcttgttcttgcccttctgcgaccttttgcaagccttgggtcaatgctaaggattgttgtgtttggacttgttggctttgttgcatggccttcattgcttggtcaaacttatcgttggcttggtcaagtgcggcgttcttcttatcaagttctgcgctcttcttatccaattcttcaatcttttgtgtagcttcttgcaagattgcggcttgaccgtccttggagttttctacccagccattaaccttcaagtcccagacaggatcttttaagctgtcgtctggcttttcaatgtgccagtgccatggaagttctggcaactcataaggcaacgtaattactacgtgatgcatttctgcgttgacagagtcaggatcactaaagtaataggtaaaccccttgttttcttgtgtagcgttttcttctgcgcccgctactggtgcaacttgtgtgttttcatcagccattttattggctcctttctattaaaaaagcccacgggaactccccgtgagcaaggctaattttttgcataaaaaaagcactcaatgagtactaatactataactgttcccttgataaatacttagtcatgatatccgatgctttgataagcggtgtgtatatcccatcaccagtattaggattatttatccaatgatcaacgtcaacaatataatatggaatattatgttgatctaccacaacgcctgtgatttcacccgtagaagctaagccgcctatttcatccggtttattccattgaatcgaattactattgatagaatagctataataagcattaatgactccctctctagaccatcctattttatatttactgcaagttatcgctctgccaattaattctgtatttacataaccgacaataatttttgttgtagggtagtagtcttctttattaaacttcatgtgatctagcatacagccaccgcctttctggtggcggctctaagtacttggtataggtggattaacgggctaattaccccccccctaagatttccgtacagtccgattttcgaacccatacaggaccatagacggtgctactatctcctttacagataattggcaaatctatacttctcccgactaaataagcggtatttgaagaggcacatacatccagctccaaatctgcgttcagtaaagagtaagtagtatttggaaaatccgtaaaaacggtgcttgttgaagttcctttgggaattttgacctttttagggaacataagataatcatttttattgaagatcatcttttcgatcatagaaccaccacctttctagtgatagctctaaatgcctgacataagcggattaggggggggttaccccaccatttcaagttgcgagcttgtgataccagcactctgtaataaaaaccataagtctcatttcccgcgcctaagctataagtgtcttgcgtttcaaatttgtttgtgataaatgcatttattcttctgtcatacccaacgatttgaaaattaatgctttgaacagatttgccagggttaacagctccgttatcatcaattaaaactgacccagatggcaaatatccagatgtaggtagaaaactagcattaaagttgccgttttcgtccgtcaggcttcgccattttttacgatcaaatagcatatgatctagcatgtttccgctcctttcttaaatagagtgaaagcatactcaaccattgacgcaatagtatgtagaaggcttttacccccccatattacatttctaacatttgttttttcaactacgcccgtgtaatagtaatgcgaataaactgcattattaggatgcttgttttcatcactatcagcgtaaatttcaagttgtccatcaaagaaataaacgtcttgacctgccccaacacaggtaacctcagcatcatttaatactcgccagccattacccgtattcgggtttttgatcggtgtttctgccatgacagtaaatcttgatggacaagcataatagtttttattattagctgtaatagcggacatatcgtttgaaatttcaaaccacttttttacattaaaaattagatgatctaacatgctttcacctctttctatctatctatttttcaatcatcgcaatatcgtttggattgttgttttcccattgctgggcttgtgcctcttggttggctgggaaccgcttgccttgcaggtagttttgtttgatgtagttgatttgattaatcaagtcgttaacttggttttgtaatgtggtaatcgtattaagtaagctattaatatccgacttccaagcgatgtcttcactccaaactggtccgttgccattaccgccagtgattcgagcttgattattatgataaccaacgcttagaacgcctttcgtatctgcgccaccaaagccaacaccagcagcaaaatcattcaataatggacctgatccacctgcgtcaattctaatagacgttagtacgctattaggattaccaaccccaaaaatatcttgccaactatttgagttttgaatctctctaaacagtggtgtagctatgttgtgtttggtgttgatctgattttgtaaattagagatgtcgatcatttttgccatctgtcgccagggttgccagttattatcaaccttcattcgataaaatggagagtcatcattatcagggtagtaagtttgaacaattctatgatcagcgccattagaaattatcagcgtaccccagatgcccccacaaggggaatttttccctttttcagggtttgtcacatagtaaggacctgaatcggtcaaactatcaaagtctggcgaatttgcggttcttgcaccttttaagttgttaacttgactctgcaaattgtccgcccttgatgtagcggcattttttgcatcttgtacttgggcgtttacgtttgattgatctgccttggtgccaatctgactaagcaaaacgttcactttattagcagtccagtcatctttgtaaagatcaatagtgtaagtgccatcagtattcttggtggctttccaggtatgatcttgcgtttgtccttggccgtctaagtactgcttgcggaacctgatctttgaaaaatcaattcccgcaatttgggcgtctaccgtagccttgtcagccttggtatcaacggtttggctcaacttattaagactgtcttgacttgccttagtgttggctaaatcggtaacagtcttaatctttgcatcaacgtcagtcgtatcgtccttagcactaagcaacttatcgacatcagtcttgctataagtcgttgcttggtccgctttggttgctaaactgtcattgactgccttaaaggatttgtcaacgtctgccttgttagccttgtcggcaatcaacgctgtcacttggtcggcgctgactttgccattggtgtcggtcgatagggctaaaagcttttcgtccagttgtgccttgctgtaactgtaatccgtaccaaccttagtggctaccacatcactaacagccttgatcttggtatcaacatcagcgttcttagcgtacggggtaaagtcgatttttgcaatctcggcatctaccgtggctttgtctgccttggtattaattgcatcattcagggttttaacctgcttgtcgatatctgtcgtgttggctttggttgctaactgactattaacggcttcactgtcggcttttttagccacttcagcgttagtttgatcaaggttagattgactagccttagtatcaattaaagccgttagaacctgcttagtttcgttgattgcaccgtttaaagttgccggtgtaaccgatgccgccgggtcaaccactgccgtgacattggttgcgtcgccaatcgcaattgctactttgaggtcaagagcgtcagtcgctacgccatccggtcgggtagctgctaggtaagcccctgcattagcaaccgcaacaatgattagcttttcgtcctcgcctttcttagcaaaaaagccaactgccgtgtaaggcaagtcagctgttaagccgtcattctgaaaagtggcttcaagcactaccgttgtgtctttgccgttgctttgtttgtcgctaacaccaatcggcacctgttttaaggggctgccaattgaggtcagggcttgcacttggtcagcggttaagtgactgatatcttgaccatacagcaccgccttagtgtaagcaacgtcaccaccagcggtcatcattgttcgcccttgttctgtgatataggctggatctctaatttggctcattcagtcgacctcctttctacttttcaatcattgctagatagtttggatggtcattttcccattgttgggcttgtgcttcttgaccagctgggaatctcttgccgattacagcgttctggtttagccatgcttgtccttcttctagtttcttaactcggttcaccaagtcattgatttggttattggcaccggtcagctgattgttcaagctctcaatttgcgtgtccttagcgccgtttttgcggttaaggtcgttaattgtgttctgttgggcttgaaacttttgatcaacttcactctttaaataaaagaccgtacccaggttgacgttacccgtgttgtcgggtgccacgccttgaacagtattaatccctgcacctttaccagcaccagcgaccatttgatcaatttcttctttagtgtaggtgtttaggttaaaggtatggttgccatccgccttgaccggttctttacctcgtaaggtgatagtcgtgttcttctcgttgtcctcgatcttgccgttaaaatcagccgttactttagtttgccatgcattaagctcggcacgagtaacgtatcccacttcattaacagtcatatcgatattagcggcttctgcgattgtcatagacaattgtgcagagataacatcagtagataaaccgtctgggctacctgctgctaaggtctcgtgatcgttagtagtaaaagtgatagcgattaaagcttcatcgccttgtaccttttgattctgttcattggttgagtcaactcttgcataccaaccaatacaactaaaattgatgtctgccggttgattcttgttgttaaagtcagcaattacatcaaagtgatcatctgtaactggcgttaaggttaattgcccttctttgagatcgtccggcaaactagtgatttgacgaattgcttcatcatctaaggcttgtccggaactattaacgggtttttgacttgataggatagcgcgtgtataaaccaatgtgcctacgccgttaccaaccgataagaagatatgtcgcccggcatcggtcaagatcgtttgcttcaatttctctttaaagcccgtattaggatcttctgccatttcttgctcctttctttgtattaaaaaactactcagtcgcaatcgattgagtagttgtagttaatgttttgttcccaatagttaagccagcgtgaatttctgctgtttgtggcttgctccacactgctgttgtcgcccataccgatgacttagccagttgaccaacaacaccaatgaattggcttctagtgctttcagctttccagccggtccaccacctagcatttgatgacaaagtattgcgatgcttgatctgtgtagctatcccaatgtattgcttgtcgcttgtcctagccttccagccagtccaccacttaacgggcgatcgctcgattttgcgatgtttgatttgcgtacccatacccacgtaaagcggcaactttgtagtagttacaaacacgatctcatcaatccagtagcccatcgcgagcaggttttgaatattctttatgatgaatttttgcatttgaagtgtttgcacattgtcccacggtatttcgataccaacatgtcgaagaccggttttatataccttgaattgttccggctttgcatttaaggcagtgcccagaattttaaccattgagggaattgttccctgtgccctagagattaaaatgtgtaaaaaaatgataaaacggaaagtttcatcatcatcactaattctataagctttgtaatcttgcccgattaaatcaagggttgtgccttttgctttgtcaatgctacgccactccgcaattttttcattttcatcactgattttttcaagcagtgaattgtaactgtctaacaattgataaaaaacggtatcttttttcttattccagtggtcggctacttccgcgatcagttggtctgttgtctcataagccaattaaatcaacctccacatctccagggtcacaatgagcaaattctgaacgaccaatagaaatattttggtccgctaacttatcttttgtgctaccgattgcaattgttgcatcatcaacgccgttgacatcataggtaacggaataaaggcgggtaaaattaactctttgacccatttcaagtgagttgatttcatcgcaaattgcttgcttaatgtcgtcaacccccgcatcactgttccagtcgtcattaattgatacatcgatctttacataaatgttatgttgttgagcgtggtcaaatttgacttcttttaattttcccgtagcgtccggagcttctttaacaattgaacccgctaaagtgataccagccgcgcatttatcaattaaggttttagcaatttcatcatcgttaccgcctaaaacataaatgtgaactgaacattcgggattaccgtattcatccgtcttatacttgtcgttgtcaatgaagccaacttgcttaacgccgtttaaattcattaacgccgatttaatacctggttctgtaggaccaggacgggcggcattttccataattaaacgttttctaaaggtttcatcgtcttcataatcttgcccaccgcctgcaggtcgtggattggttacggaaataaagtcttcatctgggttggcaaacaaagtaattgtgttggctggtacattagtaaattcaccagtttcttcacattcaacatttccagttccttgaaaagccccgtcgctttgttttgaagtgataacatcttctgttaagtcaaataccaagccgtcttctgtttcgaacttttcgccagcttgaattaaatattcgccttcagtcgttattactacttccgcatgagatggagcgtcaactttacgggtcaaactgatattgcccgctaatcggtctaatgctgaatttacagcggttgaatagaatccagaatagtaaatttgttcctgttgctgaattaaatcataagacgcatcactcattaaacgggcaaaaattcctagataagcattacttgttagtgcaatatcatcccctaatctagttcggtaatcgtcttcaacaccgtctaagatttccgcaaaacttggggcaatataaccggtttcttttaaaccaaaatcagttgtcaacttgtaacccccccttctacttcaccaatatttgcggtggctctaaaattaatctgcatttttctttcaggtttcttgataaattcgatattatcaacggtttcaacttccggtacgtttgcttcaatagccgctcgcatatcattctccgccgcttgcttattgaagtttttacctaaaaagctgctataatccgcgcccatttcagggtctagccgttgcatttcgccatatcgaatttctagcgttgccttaattctttgcgctatttcgtcaagaccgctagtcatttctaaatcgtgagtaatcggatcaataactaggtcatgattatcactcataaataggtccctagccatcgtcgtcacccttataaacagaaacgataattgagtcgtttgcatcatgcatcctgccggtatttggcgtaaaggtgttcccagtgccgtcccagttatcaatgtcacggtccatagcagcggctatcactacagcgccaactctcatagacttctttttcggataatgttctaaaaaatgtgagttaacttctgggctactatcaacggcttttaaatccgacttaaacttatctaacaattcatcaagcctatagcaagattcggcaaccggaacatctaagtactgagccgatttagtgccatcgatccaattcgccagcggttgaatatctgcaatgtgttttttcttgtcgtaagttaaaactttagctaaaaaagcagattcaagacttctgctgaatcggtttttcaccttactaatgttttcataccatcgaattggaaccctatttttttgtttcatactgtcatctcctcgtattatataaattgtaattagtcatattgtgataattaatcaaattagtatttgctttttgatcttcacatgttagcctctaattgtcattggctttggtcaactggtctaggttatcacctcctgcagttttgtctgctttataagtctgccacccagacagttcctttatgctctaactcacatgctgtattgattgcttctttttgctagtccttgagcaattgggattaggtgcagctttcaaagaagcaaccagtgaatacttatactggcgagattgaacttaagaactgtaattaggggttaacatgtgaagatcaaaatctatgatcagaaatttgaaagaaaggaggccatttccaatgaaattatttgtcggtattgatgttagttctaaagatttacaggtcgttgcacttgattcagaagatcaaaacaaacgcttaattaacgatagctttgtcaatgatctttatggtgctagtgaactgaaaaaacaaattttagatctagctcaaaataaacactatgatcaaatcattattggcatggaagctacatctatttacagttttcatcctgcttactttttccaaaatgacgaagatttataaaagctcaatgtagagactgatgtaattaaccccaaagaaaccagcaggtttcataaagtctttgaagaaagtaaaactgatcctctcgatgcttattacattgctttgtatctaagctttggacattatcgagtaagcattgccagacaagacaactatcttgctttagagcgtttaacgcgtaccagatatgaattagttcaagaactgactcgtaccaaacagcacttcattgaagctttatattatcgggttaataaactaatcactgtcgataaagataagattaatactcctcttttcggtgctacaatgatgtctattgtaaccgatagtaaaactctggatgagatcgcggatatgcctaccgaagacttaatttcttacttacaggttaaaggcagaggacgcttttccgatccagataccttggctaaagcaattaagaaagctgttagaggttcatatcgcttaggcaaagtaatgactgattcaattgatgcagtgctttctgttcattacaacatgattcaaagctttaatgaatctattaaagatctagaaaaagcaattgatcgtatcgttgatgcattaccagaaagcaaaattctggaatcaattcccggtattggcaaaacctatacagctggtattatcgctgagatcggaagtatcgatcgctttgataaagaagaacagctggctaagtatgccggcctaacctggaatcaatatcaatcgggagatcacagcaacgaacatactccaatggccaggactggaaacagatatctaagatattacttgattgaagctgccaatctagcaagattacatgatcctgttttcaaaaaatattaccaaaagaagtatgatgaagctgtctactcgccgcataaacgtgcttgcacattaactgcaagaaaattagtacgagttatctttaaattgctcaaagatgacaaactgtacaggacaccgaggtcttaatttcaaaaattggtctaaatttaaaagtaaacaaaagtttaacattaaaaaaatcaacctttaccaaggcttagtttcatatactcaaatttatgatcaaaaagaacaaatatcatcgcctttcatttgacttattaccacatgacttattttttagatttactttttttcttgcctttacttttagattttgttttatgaccagccttagcttttgtaaccgccgcaatagtgcattgagtttgtggactttcgccatcaaaactatgctgtccatttttaacgacaaattttccttttaagaacttagaattcatgataatgccggtattaacggtaacttctgggactaagggcgtaacaatttgccaagttgtcccgtttttatcatcatcgttttgcgatggaacttgaattaagtctttatcatcaatcacaaaccaagtatttttcttgctattaggattgacaattacgagcttgccacgttcataaaacatttccgattttgctaacttaacaaagtttttaattaaagttagcggcttgcctttagcggtaaaggattttttaattccttcatttttagctaaatcgattttagctattttgataccggcttgttccgctattccttcaattacttgcttataagtcgttccttttcggtaaactcggttagcaaaataagtcttattatcacggcttttaacccttttatttgtagtttttggtttaacccatacttttcgataagcccaatggtggactacatgtttctgcccttttttaggacctctcttgtaagtttcaacgaccgaggtactataacgctgattcttgtaatgacctttttcagtgattttaacggttttgtagtgattaacctttttattcttttttagcttcaactttcgagcagctacattgctgtagtttgtgccttcagtaaaagttaaaactttgctatcagttgtcccatcattacttaatttacccgtattagagataaatccttcagctatttttttagggtctttaccccagttaaaatttatccagcagtgcatcccttttttataaaagtctttatgttgcttggttaaattgaaaatagttgttgtaaaagtagacgggacaggatcattagtaaacgggacttcaaacgtaaaaggataattatgttcgtaagtttcatcgttatatacgatttgcttgtgtcctttactgtcaaccgccacaaattccatatgtggatctttagtaacgatcattagtaagacacctcctcatccgtcaggtcgtcatcattttcgttagggtcgtaacccagcggtttaattgatggatcttctgtttctgatccgtttgggtcaacaacgtcaagatacaagcggacctcatatccaaatgttcccttgccttggtctgttgccttacccgtttcgtccatggttcgaatgtcaattcgtggcaattctggatcaggaatatcaataccaactaattgaccaagcaaaagaggctcctgcgttagaagcctcttattgttatgccaaattgtaattgtgtagtaatccgcaacttcgttgtaatctattctcatatcataggtatcgcccacaagggttatttgaaagatataaggaatatttttaacatcaacatcaagataatttctcatctaaatcaccgcctacgcaacccgtattttattgccagggtagattaagttaggattcttaatgtggttgactcgtgccatccattgaacggaactaccgtatttcttagacaaagcccacaatgtatcaccagatttaatagtgatagctgtgtacttcttatttcggttacctgcgacagatttagaagccttagatgattttctgtgatgcttactatcgtttgaagtggtgatttttgcttgatagacaaactgaaaagtaagtgaaacttcaatgttatctcgaagatttttatagtcgttgttcatgtttgcaattaggtagtgcttgtaacagaaatctccccggtaggttaaccgaatatgggagctattccattgactcagcatgtgccatttgcggtatgaatcggctttatccttgcctacaataatgccagctactgttgcccctttgctgtttacacgggcatatgagctatatggtgcaccttcatcaaccggataagaagtaatgtttgaagaaacattttcactttcaccgtctgccggcgaaatatagataatttcgcctttaccgtctgaacgataaatagcacatttaccctcattcttccagccagtgttgtgctccgcaatttcagccaacttattacttaaatcaattctttgcgtaacaatacggtcgtacttgtctttcgcttttttataattgttttccgcttgctttttccttttgtttgcggcatcaacaagcttcaaacaattatcacgttttcggataagctttttctttttaatttgattcttttcaaaatgtgaatcgaagtcatagccctgcgcctttgaaaacatttttcggtaaacggcgccttcatgtttttgccgcttgtcccagtatttcatagagtcatgggctttttgttcagctgttctcttttttggcttagttgcttgaaccactaacatcaccttcatttctataagaaatcatcatcgtcacccgtatcatcgccaatatgatcaagaatgatatttaatttttgacgtacttgttgatctacctcagcgccgatcatttttgctaatttttgcaatttagcattgtcaccatcaacgttaccgttaatattcacggttacttgaatgtcacctaaagccccgccagttccccttactgggcgtacttttggcttagatgaagttagtggctttaatctttgccgcgtcttttcatttgagtagatgtgaaccggatctttgaactcagctaattctggtccatgttcgccaactagaaccttattgccaacgacaggatcgccgcctttagcatatccaagaactttgcggatctccatggcacctttgacgtgctgggcattatagccaccgcgttcccattcagacgagaacttattagctaagctttcaacgcttccccgtccctccaaaacagaacgaagaatagcactatcggagccttcacctttaacagcaaaactcaattgtgtaccggcattcttccagctggtcccgtgacgtctagcgtatgccattaagttagacttacgcccaccaagccattgacctaaaccagaagcaccaccgccggaatttaccgcgccggggtttaatccaccagattcaaaattccagttacccaaaacggcggcaataccatttttggttgctttaggatcaagcttttttaatccgccggctagggctttagccctttcggctaagtcgccgccgatactaaacgaaccaattgagccaagatcatcgctaagattctttttaatccaacccaaggcggtactgcctagctctttctttgcaagagccattaagttcttatcagccgctgctatcttcttagattgagcggcattatgcaagccacgaacacggtaatatccgtatcccatgcctttgtcatcagcaattgaggtaacgcgtgcatggggtggcgtttcgttgaacattgttccggtgtgtgggttcttaataattcccacgtgaccagcggcacctgttccatggccaaagataaccaagtcgcctggaattgttttagataatgacttacccaagtactcaacacctgaactgtgttgcattgccacggtggtacgtccaatatctacgccaaagtgacgtaaagcttgcattaccatacccgaacagtcagatagtgtcttgcttgccgcacccatttggtacttaacgccactgaatgttgattcagcatattttaaaaactgctcacgagtaccacccttgccagtggagtcaccaatcgcattgttgatgacaatccacatagcagtactccaaggattaccaaagtgagttgacgcattcttgccaagatcgaccgttcctttttgcagaactggtccgctttccttgatgttcttggtgaacatatctgcaaagctcttagcaggatcagcaagcgcatgtgatgcaatctttcttaattggctatgacttacgccactacctttggcaaagtgctgaatgccacgttttctagcgacttcttgcgtctgagtgccgttcaagacaccccagccacgaggaatcatcaaatgaacgttgtcaccatgagggaagtacaattcgttgcttggtgagacaagagcctcttgacgtggaccgctagtcgcatcattgacaactgaaagagtattttgcgtcaagcgaccgttagcgtcagacccttgtgcaaagtgaaccgtcttgatgacgctaccgttaccgccaaattgactcaataccttgtcgatgcctttaataccacggttaagttgatcaatggtgtcacccattgcgtccttagcgtatgagcgcatcttgcccatagccttgccaaaacctttgctagttgagttagcagtagaaataacaccatcgtgcatgttattcatctgcttatccacagatttacgcatgcctgtgtattccttagtagcattagctctgtttttgctgttgtacttagcagtttgactgttaatctttgaccagcttgaagcattgttcttgcttaaactcttcaaagacttagtagcgtcatcagtgatcttcttgtaatccttggatactgtcttggtggtttgaccaagcttagtgttaccagtggcataacctttgagagttaagccacgacctaaaccaccagccatgactttgcgagtgtctcttgcattaagaatgtgttcacctggacgcaccttagtgatggcaggaccattagcacctaaaagacgtgcgtttgatccggctctgtaggctaattcaggaccggcttcaccaactaaggctctatgagctgatccgattaagccaccagttgcatgagatttgatcttctcatacttgaaggctttaccagaaccaccagccgcacggtttaagtcattaccaaaacctttcaggttattagtgatacctttacggatatcgccagctttaccccagaaattgttccaagcatcttttattgtattgccgactttgccagcccaatctttgactgctttataggctttacctaattgacctggaattgaagaaacaaaagaaccaactgcctttttgcctttattccaaccgctttggatactgttgccaaccttgccagaccagttgcttacactcttgtgtgctctgtttaactgaccaggaatgccaccgacaaacttctttacgccagtgacacctttgttccaagtcttttgaatattgcgaccggtacgactatcccaatttgctacactcttggcacctttagctaagttacctggaatgcctttgacaaagttaacagtagctttcttgccacgttgccatgcccttgagatattcttgcctgtttgactagcccatttgccaacactcttcttggttttatctaagtttttaggtaaatctttgaagaacttgtggctagcctcgacagcacgattccaacctttatggatgttgcctggtaggtcttttacccacttaacggctcctttgaagccattttggatagtcttgccaacgctattagcccattttctgaatttagggttgttcttgtataaaagtgcaggaataccagcccacggagcaatagcagttaaggctaattgcttgccattctttttgacgaatgaaccagccttgccaagtgctctgcccatagacttaccaacttgaccaccccatctaccaatcttactgaatgtgtctttagtagaccagccaaggttttcaagcgaccagaaattctttggtggctttttgcgttgccagccatgtacaaagctgttaacagcactaccaccaattcgaccaaagagtttaccagcttgtgcgccaagtgcagcaccaataggaccaccgaaaatgccaccaatgatggcaccagcacctgtaccgacagcgccaccaatgtctactgatctcttagctgcattgtgtcgatctttgtaagcttggaagccttgatagccaacatctaatgcagttccgacaccaacagcaccgccaagcaatcgtctgccaactagtgctttacctgttagctcaccaggctggactctgccgagcttgaacatgccaccgaatgaattacctttcagtgcattgattaagccaccctggcgagatgatcctttgatgtattgacctgtaaccgggtctcgtggacgtacaccggtctctttgccaaacagtagtctacctataccagcgccaattcctttaccgttaccgataccgaaattagcttttaagaaaccactggctaacttggacgcacccaatgtgccaagaatacctgttatataagcagcagcagtcttaactggctttggcatacctcgcatagcttcaagtagcttgttagcatagccaagagccttgctgataccaggtgcgacttcctttgcaaagctcatacccatatcagtagcaagttgcttagttctagctaactggttctgcaatgaggacatgttctttcttgacagccttgaaatatagccagtacgtgcagcattttgagattctcggacattgtgttgcatgtcaccgtagtgattcatcaaaatctgagcatcattgaaacctgtttgaccaaataaagtttgcaggtcggatgatactcgattagatttcttaccacgagacgcacgattcagcatctcaaagatggttcctaactgtttcaagtgaccatttctggtgtacaagctattaggattaatacccaaatcatgcaaggcacctagcatcgcagtactatgtggcgctttgatcaatctagtgatgatctgacgcataccagtaccagcactcgaaccttcttcgccgtagttagataacgtacccaatgcacccagcatagtatcgatagtttgaccatttgaatgagcggcactacccatcatcttgaaggactcgccaaaaccactttcaccaccaacgtcaccggaagttaagtcagcaacgtaagcggctttgttcaaaacatctcttgtgtacttagacatacgtcttacactattaccagctctggacttatagccaaactgttccagcataggtgcagctgagttaacgattgagttgtaatcttcgttagtagcacgagcggcttgcaaaaagtacttgtgagcagctaagtcttgttgaccggaataaccacgtctgagcagttgctcagagcctctagccaattcgttttgatcaacaccataacgaagagacaaacgccggttttcagcctgaatttcacgagtatttcttctagctgctctcggagaatcaccaccggtttcctgcaagttcttgataacgttgtattcatcagccaacttggttgcttcgccattggccttcatgaatgcagcggcaactggaaccatcgcagtagcaatagatgaaccgacttgaaccaatgctgatccagcacctttcaagcggtcccagccactctttaacttatttgatgaaccggtagtcttatcaaagctttctctagctctgtcagatgatcctctagcacgatcaaaaccgctacccatatcaccaagtgcttttgatgattcatgagcacggttcattgactgctttaattggtcagttgattcagtagctttcttagccttatcagcaataccagacagatcactttgcgcacgattgagattgttattagtgccaacttgcttataactattagctaacctgtcaatctgtgttttagtttcacctgatgcacgattaagcttgtctaagccattagcggcagaatctggcatcttggtacgtgacaacacccgattaagttgttctgcattagctttaactttatcaatacgtctatcaactgaatcgaatactgaattatcaactctaacgccgatatcaataccaacatgtcgtcctgccatctatctcatcctttcttgtgcaaaataagaaagccttattaggctttaactgtcctcaccgccaaatgccaacgcaatgccttttgccataattcgtgcttgatctttagcggttaaatatgtctgatatttcaagtcttttttgactacttcccacatcactcttaattggtcgagcgttgcatgattgatccatgattcgggaacaccgtgcattaccaaacactgtggtaaccacgttgcaggatcagaagccaaatcactaatcttcttcggtgtagccttccccattaatgcttgattgaaaccaatctaaaatcttgttgtaagcatcgtcatagcctccacgcttgtcaaaccaatcgagagagtaaatctttggacgtacaatcaattccttaatagcaacgttcttcatgaagtaggtttgatcaatggcaccaagagcagttcttgcgtcatcacgtaagcttgaagcttttgctacacctggaaaaattacttcgatagtgtattcattcttcttgcccttattgatagttaagaaagtaggcttaccagtaagtgaagcaatttcactagacttttcttgcttatcaatcaaagccatcatgtcttgcaagttcttactttcagtagccatttggctagccttatcttcgtttgattggttgttatttacgttttggttttgaatttcttcgctcatagtttttctcctttaatttttaatttctgttttgtaagcgtgaaagccattctcgatactaacgaccgactaaggattcagtatcaaggttaagtgcgtgaatttgccatgcacgattaccggcgttttgtgctgcggtgttgtctggcatctttgagatgtagcagtgtgtggcggtttggtgaactgttgaagttctcaaatcgagtggaaattctgcacgtgtgttagccaattcagtcaacttggcgttgcttggtgaagtttcgttcaagttgacagtcaatgtggcaccggttttgttgttgattgaggcaacagcggtgccttgtgggtcttgtgcgacagtaacattgtcgttgtcgtaggcaacggaaatcatggtatctgtcgcaaaaccatacatcaattcaccgtcaaccattaaagtggtgtcattggcgttgtattttgccatcaagccggtttcggctgagttaaaacttgccatgtgttactcctcctttaagcttttgaattagtgaaagtatcagattgaacagtgccgtgtacgagaacggtgtggatagcacctgaacggtggtatctgaaactcaaaccaccgtagtgacgagctgataagtctttttgactttgagctgaacgtggagtggcggttactgagtaatcccccttgccagttgattgagtttcaccggtgtttgagtcgtatacttcttgttccaaaacaattccttgttcgtaggcttgttggaggacttggctacaaatggcggcgagtgcattaatgcctcgttggtcatatggaaccttgtcggtgttttgcaagtacttttggatcttgtcgcccatattggtttttacccaaagatcgccgtggagtgagtcgatgtaatcaccagacaatacccagccttctgatgtttcgccttgtccgcttacttcgatgtaagcaatagcgtgaacacggtcgatagctgacttttcttgaacagtgatttggtcagcagtaatgcccttaagctttctgaacttccaggtaactaagccaactgtcaaggtggcggttgcaccgatgagagctgcatccattggttctgataagtcgtgaatcaagccgatggtgtagttttgtgcatagaaggttacgtatgcggctggttgagtagcttgcaatactaagaagtgatccttgttagcttcgcagatgttagatgcaataattgcgtcatcacttggggtggtgtctgtgaattgtgacttatcaaagatcatgaaggcccagttgtaataccagaatgccttcaaagcgtcagcaagcttgccctttggataattcaatacggcaatacggtcagatgctgcttcttgcatgaagtagttgtctgacttgatgtaaattggatcagtcttgtcgtagtaagcgccaactgcgtctgctgttgcgtattcaacgtattgagcaccggtataaggatcagtcttgcggcttaatacgccgttcaatacgtcgttgggttccaatttgtcaggtacaccagttactggcgcaactggtgtgatctttggtacattgatggtcttgctgccatcatcagtagccttgccatcagttgtgccagtagtcttgcctgtatcgctcttagctggcgtatccttgccggtgccagtatcagcaagagcaggctttggtgctgtagaagatgagcctgcgtcaacttcatgcaaaataagaagattgccaagcccgataattgcaggtggcttgacaacagtcatttctacgtcaacgtccttaactctcgtaaaaggacgaacgtctgtaatggtttctgccatttgctattgctccttttcttttccattggcgctgataacttcactgtcaccagcgtcgctgagttgtactgtattgatttctgtttccggctgagcttggaagtggaggtcatccggtgagtaaacatgaccgccattggacactaaaaaagaacaatcaaagccgaacctatagtcgtaataggtaccaactctgactgttctgtcgcttgtgttcgtaaaattctgtgggtcaatatccgcttgctcaaagtagttacgataaacactgctttgaaatgcactgtaaaggtcgtttgccatattcatcgcttgaatggcgttgtcagcatggcaatcaatttgtaggtgtgagatgtactgtcgtcccatgcccaaccaatcgcctgttgtttcctgttccggcacaataaacgaataagtgacaaaaggatattgtggacggtcagaaactaaattctgatagagcagatcgcaatcaagacgctctttaaccagttgctgaatgatataagtcagcagaagattatctttgagttgaatttccatgttggtgtgcgtcatctcccttcaattcgtaaatgatcaggtttgaatagtcctgatagttagaagagttagtgacttcaaataaaccaccctgtgatgggacattgaccattgtgtgaacgtagtacttcccagatgacagccacattaggtctgcattggtttgagtaccgccggttaaatattgaatgagttgtgatgtcaactgattaaccggaataaccggctcatgtcgtttctctgctgttttttcatcgattaaggtagattgatcgtcagacattaaaaaaccacccacaagctcttttttgcctgtgtgtggtttgtctgatttccgaacttcgatatcaacgccgtaatcgtccaacatcgaagctacatccatgtaaaaactcatagtgtcctcctatttcgaaatgatcttataagtgattttgttaatgagtgccccaccttgaccgccagcatgtttaccgatcaatggattattgaaacctttgttatcgatagtcattggtgcgttgcctggcttatacagcctgcgcatctcatgctgaatgtcagcaacagcgacagcacctagcttgtcaagtaagccttttcctgtagcacgaccttcaaacactcgctggactccgacctgtgtcaatcgaatgtacttttgttcatattcaatcgaagtcttacgaagaaacggtcttgaaggaattttgacttctttcatcaaataaaagatgatcttgaagcctgtatcactgcttgcatctttgaccgctaggacatgagcacctttcttgccacctggtcggaacagttgctgatcaggatgtttttcgtcccattcactactgctcataggtaagccatcctcaccaagttcatcatttttacttggtatgattaaccagccatccggcttgtgtggcttgatatcagcgccatattccaatgcagatacaatttcgatcaatcgatcgttaccccaaaaaccaattacgaccatgtagcgatttaatatgtcgatttcgtgcttgattgcgtcccaatcgcttttatcatcagtgattttgatactcaatgttgcactactccatatcgattactgccaccgcagaataacttccataagcggtagtagtaaaggccccaaacgcttgaatggagccaatctttgccaattttggactcgtatttacgttccaagacggcaactttttcatccaaaataccctgaccagcagaagtatccatgctagccaagtgcagagccagatatttgatcgctgtaagcgtaatgtcattccatttaccgtcaactggctgagggaaaccatccgccaatgtgttaacggtcgcatcgtgaattagctctttgagagtgtcgtctgacatgctccgagttaatttaggtgctgcgttcttcaatgcagtgatcggtaccactggatcatcagtgttcatagttcccctcctttagctaattagcagttggtgtattgataccagtaatttgaacgaatgccgatgggtagcgaactgccaaaccaccatgacgttcaacataaggaatcttagtaacaccgtcgtggtattcctgttgtaattgagtcatttccattgcaactggaatttgtgcaatgtcctcgtcagttaagcagacaatagccatatctttttgcttgtcagcctttgaagcgttctttgcatgccagtattgaccttcaagttcaggaacagcttgaattgaactaaagtattgagaaaccatgtctctaacagtgatgtcaggacgaagctttgatactgggttatcaagcaagtcaatttcggcttgtggcatcaataaagttggctttgcgtttgcgtaaccaatcaagtgagtaatcttttggactgcttcacgtaagacattacgcatcttcaaggcaccgtcttctgtgtcttgtgccaacttatcaagtgcgtggtcaccatcaagagctaattgttggaagccggtcacatctgtattagtgtcagtcaagccaataattttagtgttaggaccaatatccataccgttgaaaatgatacggtcacgacgttcagcaagaccacgagcaacaagagcagcttgatcagcaagcaagttgacgttagctgcttgtgcttcttgaagttccatccatgagtactcacaagctaatgctgattgagtaattggaacttcatattccttgaaaccttcgtcaactactggaatgtcagtgccacggtttgcgtaggcttgtgccattgccttagttgaacgaaccttgtatctgtaagacatttggattgggtatactttgatagtgctaaataattgcaaagcaactagtggagcagtctttggatcgtaaatagtttgatcgatataggttaattgttccttagttgcaactcccatttgagccattaactcattacctcctaatttttcttggtttcagatgctggggttggcgtttcaggtggttgaattgcgtgtgcatcgtccttggttgggtcagcgccaccggtagtgccaccaaaacgagtgcggactaaaagacgtgcagttgagcctttatcagccgaacttaaaaaccgaccaactgcatcgtccgcagtggtcggtttaaatgaaccgtcagcatcaacagtggcaagttctccacggtcgacatcttcattaaccggaacattgatagttccatcagtaagaacaccgagaacttctcctggatgccatttatctttttcaatgtcgtcttcatagaagtggtcaacgtctaagtagccacgctttactgcaacgccgtagataggtgccttagtagctgtaactgcttgaccgttaactaaagaaacgccagcgccgaatggaatatcggcactagcgacttctgttaagacttcgtattgtctttcaactgtaccggcggatagatgaccgtcgtggtacatggttccatcaggaattgccattacttgttacctcccttattcttgtttgcaaggttgtagaagttttcatgcatttggttaactgaaacattactctcagcactgtcacccttgaagtcgtgaacagtagcaccaacgaagtgtgattgtttgcggttctttactgcattgaagtaagcattaacgtaaacgtcatccttgccatcaatttcagcggaatcaccatcaacgctcttgatagcttcaatcttcatttccttttctgacttgccgtgaggatcaaagctgtcgccaacgatagacttcacatcatcgatcaagcccatacgttgatcaaccaacttgtctaaaccgtcgccttcaaccttgtcacgataaccttgcaattctttttcaagactatcggctttggcttgtgcttctgacctgtcgttttcagcttgcttattgccgcttttcaaagaatcacgttcatcagttaatttcttgatttgtgcgttaagttcatcaattctcttttgatttgctgaattgtcagagtcaaacttgatcaacttatcagcatcatcggtagcgaccttgattgtttgatcgccaatgcgtaccttttcaaaatccatttgtggtttttgccctttctctttactaaaatcgtccagctcaccgatcatttcggcactatcgccgacaactgatctatcaagtgaaatgtctggaccttcccttgccacatcaacaacagcaacgtggttgatagtgatgtctttttgtactgagtcatattcagtattcttgtagacaccgctttgaggcacgacctgcgtttgaaagccaatactgagttgacgcttgccgttatcgaccttgttaatcaaatcagggttggtaatcgtcaaatcaactcgaactgtgccgtctgcctcatctacatgggcattcgacgcagtaagacctttcatcaaagtattcgtgttgctcttatcaactaggattcgctgaccagcttcattttctggatgattgtcagtgattggcttgttgtttgcactcgccaccgtgctgtcagacaagatatcctctggcagtttggcttcatgacgaacagtgccatccggtttcaggtatttaaaaacgccagctcgtgcgataggcacgtttctggcgtgaatgtaacctgtaattggatcctttgttatagcgctgactgttgatgagtcgtacctcgtaatcattacttaccaagtggtacgttgatagcttgatcaggaatgtagatcacttgaccagccttaacaactgggttggtcttggataagccgttgaagtaacgtagttgttggtaggcaactaagacttcatttgcaacatcaagtaaggtttgaccttccttaactgtgtagtttttgcaatttgtgtaatcaaatccattctttgccactcgtttcacctccttttttggagttgattgagcgtttaacgcagttttttcgtgattaactgctacttctggcgcatcttttgtggtttttggtgcgtcaactgttactttctctgagttaataccgaaaagtggtttgttatctgtcatgtcttacctcctaataaaagctaaatatcggatcagccacacagcggcagttgattggttcgccaggcatctgtccatcatcaccgccagttggatcgtcgtaggtttgacgagtgccatctagttcttgatgtttgggccgtactcggttatcttccattgattgccagacgtaatcttttgcgcccgccgctttgtgtcgactctcattgaacttagcaagcgctgatccggtttgatcattagcaacaagtgcagcatgtctgactgacataccagtttgtttaacgatttcttttgtaattacaccggtgccgtcaccatttgagatagctcgtgagatgacaccagtgatgctgtctgcatatcgatccttcatgtacttgatcagttggacgttctcagcaactcgtgcgttaaatatcttggtcaattcagggctatcacgtattgggttgataccagctatccgaatctgcattgcaacgttgttgtagctaaacatatcaatcgttctaacaaactgttcagcaattttgcgaatagttgcatcactagtggcttgtttgatcgtgtagcccatagcatcgaggttatgtagtacattctgttgttctgtttcagtcggattgttctttttaggtgcatcaccaacaatttgagtaccgcctttgaagtagtcccccatatagacgttgaaatactccatagcgactttgcgccactgataaaccaatctaacgatgcgtcttcgataagcatcttcaagattgcgaggatagcgagtgtgaggcattcttctatgagtcgtcatgtttctcagctcgtttcttgtctttttgatagttatccacaatgttctttacagtttcagcatcaacactgtcacctgctgtctgcattgctgggttagggttggtgtcttgacctgctagcatgtcgtggacttcgtccggtgcaagaacgccgttagaaatcaaactactgtaagcattagcttggttcatgaagatttctgagtttgtcttatcgtccatggtttgtaagtcattgaatacgatcttccaatcaagttgatcagggtcatcaccgtttgcgtacatcaaaatacgagtgatctgttcaatttcaggctttaacaagttggtctgaattgccttgatgctgtcgtagtagttgatgacatcttgtgatgcaccagctaatgtcccagcttgttcaccagttagaacagattttggaataccacatgcagcactaagctgttgccatacgaagttgtaaagcaaatcaataccgccggttggtgttgctaccttttcaatactgtcttgactatgaccaaacgccattgcttctgtattaagtacttggctaatctcacgcttatcacgtttaaagtcagcgtctccttcttccatcaactgatcagacttgtaaaacttgaaagtaaattcacgtaacatcttcccagtcgattcaagtgcgatatccattgctttgagttgatcctgacatctggtcagaattgacgtacctgtttcatcatcaatcaacttatcaagtgcaatgtgccaataccggctttgatcaataactcttggagtgtttctcggagtatttggcgtttgagtaccgttaggatcgaccttgtaaccggcgttttgtgttctgagtacgattgcctgctccttaccatagttaagactgagtggatcatcgttagacaaaaccttgtcaacgtggttttgaccaaatgcatgaatgaagtgaactttttcaactgtggttggatcaagtggcttacttgaatcggcatcgtcattttcattaacaccaatagtgatataaccatcaccgccttcacgttgataaacgagttgctgagataaggcttgtgtagtcttcaaatcataatgaagccgttgatacatcttctgacgttctggatcgtcttctacaatcacccgaaaaccatttcgggtagcatcttcggctggtttatgaacgatacgtcttgcaatagcattgtgttttgtctcattgtgcagtgcatcgtagtcttgttcatcattaaccactcgccagcctagattgtcataactggtaaacggatcaaggtcgatgccgtcaccaacaatggttctctttttcggttctgattttcttctgctaaatagtcccatgtttcctcctttctaatatctgataactggtccacgactatggttgtcgtgaagtctcttaactgcgtaaaccatcgagtcaacgttgtcgtcgtgcattgcgttaggaaatgcaaagatttcttcaagccagtcctcgatttcaggtcgccactttggatgtggcacatagatgtttcctgattcccatactggactaactgatgctgctcttgcttccttgctatctgcaccaggtgaaacagcaacgattcctggtatctcgtgttgcaaggcatcaatgatagctggaccattggctcgatcttcgaccaactttgttgttgcgtctgggtaaaaccttgtcatagctctaatagcatctagcgtctcagtgaatgacaaacgcttgtgacaccagccaggtcgtagatataagtcagcgtcacttttgctccacacttgaccagcgacaaagtcatcgttggctttgctcttgaaagttgcgtcccatgcctgtactgatgtatccaagtgtttaggcaatatctttgcgtctttatcagttaagtgaagtcttacttgtgtttctttatcaggaacataaaacttcacccattcacgtttgaagatattaccgccttcaactgttggactttgttggtacaaagcagtgaacttttgagtccccatgtcgtgcttgttgccaagtagttcatcaaggctatgcaagtcaggacatagtgcctcgccattgtgtctgcctaatacgtctgtttcatcaggtccaagaccggtagcaatagcaggaagtttgatttcttcccatgggaagcttgaattatcaagtaagcgtcctgcccagtcgtcctgttgccatctggtcataattacgatgactgagccacctttttgaagtcttggcttgaatgttaataaccattcattccaaatcttgtctttaatcgtaggtgatccggcttcttctgcgttcttgattgggtcatcaataatcaacaagtcagcactcataccagtggcaccaccaaggattgaagttgcatagaaaccaccacgatgatcaacaatgttaaattgctgagccgtgttttttccaacttgcaaagcatgatcagcatctggtactctttgagaccataaagaaaaaagccgtctatttgattctgcaaactgactgtataagtcttgtgagtaagcagtaaccataacgtgcttttcgggatgcttcataaggtaatagcttggaaatgttttggtgatggtaagcgattttccgtgttgaggcggacatgaaattatataaaaatgttgctcaccatctgcgattttttgaagcagtgaacagatgtacttcgtatgtggatacattgtcatatctgggtaaacgagttcaaagtacttctgatatgaccgccaagccagttcatcttttagttcattgacagttagctttttaaactcatcgagtagtgctgtatctgtcacttgctatcaccgccttcaatagattgaatcatttcttcaagttgcttatcggacttcttggatattaacttacgcatacgaccggacttgtcttgtgattcattagtacgtgattcagccaaggtagcctctgcattgagtttacgaagttgagcctgtgtgattggatcatctgtaattggcattctctttagtaactcctttgcagcatcaatccgattcttccaatttggtggtatctcttcaacgccatcatcagtctctacagtgatttttaatgtcccacgcataactccacctaaaaactctaaaacctctttctgctttggaattttggcttcatcgatctgtttcatgcgcttgttgatataatcgttgacggggggtaatcggagggtacgttttgcctctgtattgatcgtttcaggtttcattcgatcagttacatacgctgatttataggcttctgtggcgttaccaatttcaatgaacttatcagcaaagtctttttgttttggtgtcaatcttggaatagtttttgacttctttttctttgcttttttcttcaaaactggtttcacctcctaaatcaggccaataaaaaagacactgaacttaatcagtgccgttgctgtctttcaagtcgtcaattctcatattaataatgaatgctaagccgtttagttgattagattgatcaatcaataattgcttttgagtgtgaccaatctttgcacattcagatgatcttagaaactcttgaatcttgattgatctttctgtatatccttcacgttctttgatcaacttgctaattaattctttgttttccatgatgttgtttccctctttttttatgtttgtgtttctttttgtgctcgacatctctttcaagttcagcaaggattttgttttcttccttacatgagacaagaccatattttttagtgcgatacattgctgattcctttcacacgaaaaaaagcactggggttaaccagcaccttaatacgtgatcctgaatgtgttcatacataatgtgttcttgattttaactaacagaaccacgaaatgagcagtaaaggaattgaacctaaactgtccgccattggtcaatttaattcgacagaggaaatctatattggaaaaactcgcaataatcgactcatcgacggacagacaacgagtctgcccagaatggtagcagtttgactactacctaatacaatttgagagattttttataatgatttattgattatcagttcaccaacatcactgctggctaagatctaatgaagtgccgactttcagtgcatgcagagcaacatgatcaaggggagattttcacctccacaatttagaaaacatgtacgttgccgaacttagatcaaggggccgccttttcaggcggttaggttaggaaaaccttgttatcagaacacggactcaatagtccttttttatatcaatgctccgctcgcttgcggtcatcgcagagctaagacgtgaggcaggtattctactgcgacacgtcgggaaacatgatttatcttgtcttcaagcatttgttgaatcttcgggttcaaattcaataaaaaacaacaagattgattcagcctcagtatttctgaggctatgacagcatctggattcgaaccaggtaacttgcaagccacatagtatgcaatgctgtcactctaatttacaaggagaatagatctaattggtaaaaatgaatttccgtcgcatcggtcgaggtagatctcctatctactttctcgacaataacaattatctgcttttttcatcatcgggcgatcccaacttaatcccgattaaatcccaagcaaatccttttcaaatcccggtatgatcccactttcatcccggttacatcccattttttcgttttcgcgtagtttgatctgctctccaaccagcgtctgctagagtttcaccaggataaatctgcaaatcaaaacgatcagcttcatcaggaaaatacttgtcttgtgccgagatccaacactcagcaaattgattcaatgcaacattcttgaaatcaccgaactgattatgattcatattacagtcacgattgatttcccatactttcttatgtaagacgtaaaattcaaatagtatctgaggagatacacctgatgtatgatcaatggcatatttgattgctttcaaaacatcaaatgctgccagccttctttccatcatcttttcttggctattaacgccatttgagtgagcgggagcaagtgatagctggggactagataaactaaccccactgagccgttccattctgttaatctggctgctgagaaaatcatctacattttctgctgttaaaacttcgtctggtaaatcaaataaaaacactgtcccactcctgtatctcttcaaactttaaaatctacatcacatcattatttattttgcttattgagtatttctcctaatttcttcccatcttcaaacgcttgatcagtactacctttataataaccggcattgtaattggcttcggcaatgtccttaaccaattgtgcaatgaccttggcttgttcaacggtggtaataacttttgcattctctagcattttatagccgtcttcgttgatgacatcataaccactctcagctaagactgactttaattgatcaattggtttcatttttatcctcactatgaatctctaagcgcaatttcaagcctgctgtacttacgtaatgatcagctttattgcctaacttccagaaatgaaggttcaaatcgtcttctaaacgatagatgtgaacgccatccgtgattgtttctcctacaccaagtactaacaactgataatctccttaatctaaacttttatcttcaaattcattgacgttaccaattgacttgcccttaacaacatttgctgagaacttaaccttgtcaccaggtctaattaagttggcaaaatcataatcattagtattcacagtgaaaatgatatttttgcccttcagcatgaacattgccttgttcttgttggaaacaactgcagctcgattaatcacgccagagaagtttttcttcttttcacctggtgtgttacctgccgaagagccagaatcaacaagagcctgtctaaatgaatccagagcacttgttggattgctaccagttccataaatgctttgatcgcttgcatctaagtagtaatagccacgaatagcatgagttgaatctaggatagtcattacccaagttggacgattatttacgttatagagaattggcatattagcacgccatttttgagctttgtagtcttgatcagcattatttttagcgccatcgctgtccataatgttgttagttctgtagaaagtgagcttgccagttcttgcattgatcatgctgtaacctaatgctgaatcagcaccggttctatcagtagtaaagtcagtgaagtaactaatcgaaccatctttgttgaagactgaagttacaccattttcaacgccatttccggtcggcttcatgatgccggtcttgctccagttccagaaaccatacttatatttaccaaaatcgttgttgatcttatcagcaatgccagtcgtgatgccttcgtcaatgaacttaggcatgttgtgcactgaataagtcttagttacaccggttcttgcatttaggacagccacatgtaatctgccgaagttaaccctatggctcattggttctgacttgtaaactgtttgaacccaataaggatcaccattgtcatcaatttcaagttgtggcgtatctaaactaagccaactaggattgtggcggtagatttgacgtgacgcatctttgttgaagtagccacttactgcgtagtaataaggtttcttaacaaatcttggtgttgcattttgtctagtagcatcaatgatgaaatagccaggaatctcaccagctctattgctttgaaaaaatccgttatattcaattggaatcacataaactggcttgcctttgtagtactgtgattgaatttcatcagaaatcgaataatattgcgtgtttggaatatcagacgatgcttttctaacacggttaataactgttttaggtgctaatgcaattggagtttcattgcgcttgaatgttggcgcttctgtgctttttgaatattctttagatatagaatcccatgttggcttaacagacatgtgtgagtgcaatgatccgcctatacaaactaagaacaaaatcactaagacggggatgcccaccattaaaaactttgaactagcatcgtcatcatcgtcataagcctgagaagctaacgttaaataaaatatcccataaaacgtattaccccagagaatactcagcagatttctcgacggtagcaagaagtaagtaataaccgctgctataatccagatcggcaaaattgaaataaatgcccaaattttatttgatgctgtggctaaaacaataagcatcatcactaatggcaaaattgtgtaaaagaaccaaattgatatcatttttcttccttccgtttacgtccatattttcgatttctaataattttaaataagtcacaggcaactgcaccaaacataagaaaagtcatcaccagtaagcccataaataagatgatcaaaagaattttaagtataattgcagccatctccattaataccactcctttttatcggtatctggatagccataaccgattaatccttcgtttacaatctttagcgcatcgtcaactgatctcgcaataccgtggattacttttctgtgcaccgacggtgagcagtgagttaatcactgctgtgtacttcataatgtcatttgatctcatttggatctgtcgttttcttttatctgcttgcattagtaatcctccatattttgcttcaagtaatcactcatgttcgaatacttgtgatcaaagtcgacaggcacaagagcatgatgtgctttcacatagtcaacaagtgcatccccgccagtcgccatcataaatcgtgactttcatgttcttcttcatcagggctaataaattcttcattattgttaacaaaattaaaagacctcatagcaagattcattaagaaatcagttctgtttttcttagcatcaatattttcaagaaaaggtatcaaaccattttcatctaaaagaactaaagctctattaatcaagtcaattgcaaccgcttattgatcttgtctagttagtttttgattatctatttctatttctttcatactagatacaagtgcagcagaagttaaatagtcaattaccatttgtctatcagttattttcatttttatgctcctcttgtaaagctcttcctgtaactgttcatatgctacttatcgcttttaatttccatcatgatcttcaaagttctagtaagatcatgatttctttctacaagccggtcatttgtctgctttatctgctattttcttcatcctcataaattactactgttactagctcgttattctcatctttaagggttactgcattaacaacatcatgaacttttatgaattcgttggggtcctcgccatcagaaatattaaattccttttgtttaaagtgtctgtttcttttttcttcatacatcactagtgcggaccaatcgcccttaccgtagtcgtccgaaaccacctccgtaaatttaatatcgatgatttttttaccttgaataaactcattaatctttttatccaaatcaggcaaaaaatgagaccagagtaatttaactttcataatcttcacccctcaatcattacttttttctttatctgtcatttctttaactccttttacttttaccagtcttctgttcccttttcttgcaaatggtggaaaaaccaaaacctattgcatgtgttacaaaggagcgtaatttcatcaattggctttaacttagcaccacaataagggcatttatagccatagaaatattctggtgtcctattttggaaaactggctcatcatgccaatactttgaatttttcatcttttagctcctaaaacggaatatctccgttgtttctaagcaactcggttaagccgataaacctagcatgcggcgcataggtagtgaaccatgctgtatgctcgtcaacttcccaaaatctgcattcgtacctcgtaagagaaaattcggattgcaaccagtacttttttccgtcaactagctggtcggctgacgtgattaattttctaagtctattcatttcttgtaatgcctctcaatcttgatttcatcattcagcattgttatcaagtagcctattgggttattcaccaagtatgctgaaacacgctgatcatatactttgctaagactttcaaagtcatcatcagataacatagaaacttttaatctgatttgtttaagttgtcttagtgtaggtctaagatgctgattgaatgtcttattgtaatttctgatagtgaaccataatttattcattcttgaatttatttttgtttcttcttcttctgatttgtctttagagttatccacagtttcattctgaggggagggtttcgatttattagaagaagaattaatattattacttgtagtattatctcttgtaatattctctttgacattttcgtcaatagggtcttgatctttttgacaataccctattgatctttttgtcaatacctccccttccacagaaacgtatatcctacgttgctggactgttttatctgcagctctaattatttctacttgaatatagcctttctttttaagatgacttatccaacgtgataccgtttctttactgacatcatagagtggagcaaagtaattgtttgaagccgtgcaataaccaaacttgttagataaggcagttatttcactataaagaagcttttcattaggtttaagatctttatcatatctaacatatgctggcattattgagtaataacttggttgattcattttactcacctagctttgcaaatggatctttcttcttagttgaatctttcttgccatcaacaatttctttgattttttgatcttcggcatcttgttttgacttttctttatcacgatccttaagtaagcccttagagaactcataaatagcgctgatactcttaatagcaatcttcgcattaactgaattgcctttgtctttgattacttgctttgctaactcatcaccagccatagccattgcaaacacttcagttaagtctttacgcttgccatcataattaattgtcatgcctttaagctccttaggagtcatgtagtcaggcttagagttaaactccttagcatcagtgtcgtcttcagaagcgatgccgtagatagcgctgattgaatatctacgagcgtaagtaagtgccttaccgtattcctgaggattaggactgccgatgtccaacatataagaaccgaagtcgaagatcgcacctttactattaagcaagtagttatgaataccggtcttgccaccatcggttactggttgctgaatataagcgatgtcctcatctgaacttgcttcttggatagctttgataactccgttcaagtcagcatatttatagccataaccttgtttatctttacttggctgttgcagctttctttgaacattaacaaatgcactcatcaaagccagttttgccttcaatgcatcttctggcttcaatcctgagatagctttgaagcaaatttgtccaatccagtcggctgggctttctaataattgcatgattagccctccaatccttgatattcaataccgttgtcctttaggaaactttgtagctgcttcatttgccatggagtacccttgacttccaacttaagtgagatcaccttttctttgatctcaccagtttcaggatcaacgtacttatctccttgctttttaaggttgttaagttcattcaacttggttttcttttgagcttcagagacggcatctaggtcttccttgtattcggacattgcattaagtacgaatgacaaaggattattatctagtgctttgatccagtgatcagcgggcaaacctaagctttcagctttttcactgatgatcttgatgttgtcagcaagttgagcttgttcttgctgaatcaaagcaatttgttgatcgacttcagtttcaaacttagttttgctgtaggatttgttgtcccagcttgattgatatttaatttttgtaggatcaatttcagcaaattcacacatcgtcttagtgtgctctaaattattttcgtgtctttcggcttttgccttatcttcatatactttgataccagcactaatttttgcgcttgaatcgtcaattttagccactaacgattccactttatcgttaaaatctttaactggcgcttcagctttctttttaatttcaactttgcgtgccttaattgcttttgtaagcttatttagctttgcgcgggtagacttagcgtcttttaggttgtcttgcgttacatcatagttttcaagactttcatgtaactgatcaatttgatctttcatttggttatatccactgaagtcaatttgtgcaggtgcaaagttgactgggaatgctacagccttttcatctaatttaattaattgattttcgttcatgattagtactcctccatacctaaataactggttaatttttggcaattataagaatcttcgataaacttcaaaagatcatcaccgtagttgctaagatctaaaataaaatcaaaatggttaggtgaaacatcgttgtagtccatttcatctgctaacttgtttaaatctccgttgtaatgatttaaacgtcctttaagaaattgagctgcagatttatagccgtttacgaagtcgtcagcagatttgccaattaaagcctcacggccttcaggcaactgaacaactaatgtgtcagggtcattttctgcttgtatttcaagctcttctaattccttcttgcgattaatttgttcttgtgagtaaagcattgtggtataatctccttagttactttttggtttaaagatatttttctttgtccctttagctctgcaaagctaaagggctttttttatgcctaaaaaactcttgatgtaggctggaagttcagaaaagctcccgctagcaacatgcaaacaattgctattagcaaggcaattttgttggacagcgctaaggaaatgggcttgtctacgagatacaaagtatttaaaaatctgttccataatttcatgtttcctcctatttcttgttgtgcttaatgactaatgcaccaattacaattactaaagccgttacgattgataatgctggcaaaactacgtctggatggttctcgccatacagtacggtctgctgaaccactagaagtggtacgaagatgattgatagaaactcaaggatcttctcgaatgccatgcagaagtaactcagtgcgtgatccagctttgtttttccatactttctttcaatttcctttttagtcatttttctataagtaacctttcactccacgagttttccaaaatttatctaaatccgactttttccatcgtgtgatcccttcaattgtccgagacggaattttgtactttttacgccagcttctgaaagttgtatcgctaactccaaggtactttgctgactcaccaacattgagccactcacgtgaggacagctcgattatctttttcacgtcttttttatctagatttgatttaagttctggtttcatcgagatcacaatggatctcacaaacttagttaaattttcttcgtctagaagctgcatcgtttatcaccttcaatctgctacaattaaatcagccttcaataaggaggtgatttaatataaaatttgatgccgatactataactgccgtgattgctattgctgctataatttctcccgtcatagtaactatcgttaacaatgtgcatagtaataagtggagagaattagaaattaaaactaaacattttcaaaattcacaagataaaatttccactttgaatgatttagttacaaatttcgttgcagctgctaacgttcttaatacatatgagcaaacgggtggctggcaattaaaagccaacgccagaaatcaatttgtaaaaagcggttctaagttgctaccatatctttcacccgattatcaaaaactaatgcaagactggttaaagctttcgcaaattgatgataaaagcgcctggttttcgatcaccaaacacattaataatgaatctgttaatcttttaaatgatgtaaaaaagaacgcatacagtaagatcaattaacaaaacgtacaaataatatggccagcttaatgcaaaacctgtttgctttttgatcacttttcgatcaagcactatagcaatagcacttattgttaaaatcaaaataaaatataaatttttcattgctgaccttcttaatagatcgtggtatcagagccaaattcggctcccatcttttcaatttcttttttagtaatctcggcaacttttgaagctgatatgctttgcatgttggcttttttatttcttctctaacaatctttctgacttcttcacgttgctctggactaaacttttccatttagatcacgctcctgtctcgaattgattcgattccgtaaatttcttcgtaatacttatcagttctgtattccatgaacttgtcccacaattctaggcggtaatacaatcttcgtgctccgtcatgaataactgcttttttgtagggactatgttcacaatctcttgtacgtctcatcaatgtcgaccggctgattttcagctttgccatcatttcttgcttgtcagtaaatccatgatttacacccctaactaagtaattcaccacgacgcttcaattcagcatcgatcttgttggtttgctctgttaacttttcccattcttccttagtgatatcgagtgccattctttgaataagcaagtcgcataacttcgaccacaattctttagtggacatagctgctagaattgtcattttttattacctcctagacagatgtcactcattccaagttgatcacagatgcttgcgataatttcactgttgagatcttgaagatctttgatagttgctggacgtgtaacaccaccgttgccatcgaactctttaaccattccaaactctgtttttgaattattaagttcattgagtgcttcaagttcttcacgtatgtttttgtagcaattcatttcaatcacctcctatgcaatgtcgtcacgttcaatcagtggcaaaatgtcgttatcttttagaacgtcgtagataagttttctacctgcttgcgtccaataagttgtcgttctgcttcgatctctgccacgatgatcttgaaaagtgaatgccttacttgctacgtaacctttacccatgtatgccttgtaaaggatccattgaccgttgaccttatgctgaataccaacagatttcagaagcttgttaaatgccattgcactgtatccgtaatctgctgcgatttgagtagttgctagtagatcaggagtgccaaggatcacatcgagataactggcctttttgttactttcttcgagttggatactcaagtttttgttttctaatttgagttgtttgattcgagcatttgaaaattccaatgctctatgcataaccatttctgggctgttccatttacgctctaggtctaggaaatattctctataaagctttgacttttctgttcttgccatcattgctaattgcttagccatttcaatggttaataaataatcatctaactcacgaacagcgccgttgttaacaaccgtacttgatgtacacttgtaaaaatcctcattttcagtgaatagttctgaattagttttgaaccatctgctaaatcttccttttagtccaagacctttatgtaagtctcttgcactaacaagttgacgatcgtttttgacttgaactttcattagttcttccatttttgcactccttttcttctcaaaacgggtaactttatttcaaaaaaatatctggtgagatacctaatgctttggaaaaagctaccgcaaagtcagcatcaaacttatatcttccattaagtcttccgcttagtgtaggctcactgattctcaatttatcagcaagccagctctgcttaatgccatgatcacgcaagtattgcttagccaatgctcttgcgttgtctttcaagacacttgccatccgaccatttcctttcttctcatttcgtgtaactcgattacagttatatattactacccattttgagaagagtcaacatttttctttactttttgacaagaaatattttcaaatagtaaataagaatttacaatatactcagaaagagaaaaaaacaaagaggtgcagttatgagtgtattcggtaatcgactaaagacaatgcgagaaaatgcaggctggactaaaacatacgttgctaacagactgtatcttccattaactacttatgcaaattatgaatatggtaaaagagagccagatataaacactattggcgctatttctactttatttaatacaacaaatgattacttaatgggcaagactgacgacccagagcctaatccatccaatttatcctctgatgacttggctgaaatgcttaacaacgtccgcagttataacggcaagccattcgatgaacatgacaaggaacttctcacaactttcttaaaaggactatacgctgacaagtaggtgttttatatggatagtaatttgaaaagattacttaaaagaaattatttgggagttgcttatttgcctattcacggtaaaggatatctagtcagaactaagggaaacaaaaaagactacattattgttaatgagaatctaagcgatgaggaaactgaaaaggttatccttcatgagataggacactacgaacacgacaaggaagttcttggcagttataagcacaatttaaggtcaagagctatcagtgaacatgaagccaacaaattcatgattcaccaagaaataaagagctatataaatcaaggctatgatgccatcaatatcaactacgttaacttggctgacagtctgggaactaaagattattttcaagttaaggaagaactagaaaagtattgtgaataattcgtccagggtaattggcaccaatgacgttaaacttcgtgcctagtttatggaggatatagaaatggcaaaggaaataaaaggtgaagatggcaaaacctatgtcgtcaaagaaaagaaaccttggtataagcgctggtgggtctgggttatcatcgtgattgttgcaatctttatcgctggcggtgctttaagtgatgatgacgatgatgattctgacagcggttcagcaaagacagagcaaactgccaagaagaaaccggcatcgcataagaagtctgctaaaactgaatcaagcactcaatctaaggagtcaaagcctaaggaatcaaagccaaaggttccagaagaatataagaacgctttagccacagcagaggaatacaacgaagaccaaccaatgagtaaggctggcttgcttgaccaattaacttcaaaagacggtgaaggttttacacaagctgctggtgaatatgctgttaaccacattcaagttaactggaatgaaaatgctttgaagtgtgccaaggaatatgaaaagaccgaacacttatctcgtgcagacgtacaagatcaattaagtggcagtgttgatgatggtggcgagggtttcaccccagaacaagttcaatacgctatggatcatttaccaaagtaaagaaggcttaaaaatgaaacatagatttttagtagctgcattggcatctgtaatgcttgccagcggtactggtgcagttatcgcacctagtcattcaacacaagtacaagccattagcaagtactcacaccactggcactgggtaaaggtaaccaaggaaacaccaatatataaggtcaaggttggacgttatatgtatcaaagtaagttaactcataagacttacattgagaaaggatcagacttgaaggttatgtattccggtcatgactacccatggcgtgtatacggtggctggcgtggtcactgggttgctttaagacaatcagcgaactggttcaaaaacgaatagaaaacaaaaatcctgcctaccctattcaggtaagcaggatttattacacagttggttagaacgttagtttgaaaggatgatgatatatgcctcgtagaaaagacaatgagatctacaagtacaaattgaagtcgggcaaggtcaagtacggatttaaaacgtatattggaactgatccagaaaccggtaaggcagttaagccatctcgccagggctttgacagctacaaagaagcggaagcagctaagaccaaactaaaagaagagggtcctagtaagtttactcataagaaagaacagaaagaaaaccgaaaaacggttcaagaagtatatgagatttggctagaagtttatagagccgatgtacgtgggtctacgctaagaactcggaaatctaattggaagaacaacatagagaaagaatttggaggcgtatatatcgacggtatcgatattaaccacttacaaagctttgctactaaattggcggaaactcatattaattaccgttctattttaaacttattacacagagtaattaagtatgctattctacgtgattggtgcgacagagacccttttgataaaattgtgatgcctaaaaaaacgaaggcaaaaagtaagcaccctgctaataacttctatagtttaagcgaattgaaaacatttcttgaatgtgccaaaaagtataaagagaaatattacgtttactttatgacagtgggtaatttaggctgtcgcccaggtgaggcactggctttaaagtggaaaaatatcgacttcaaaaacaaggaaatttttattcagcattctatcagtacagatgaaaatggcaacaaaatctatggtcctaccaaaacacctgcgtccgttcgcaaagtccccttatcagatcagttggctatagtactaaaggagtataaagaagaaacaatctataaaaaaggcaatgattttatcttccacaaagataatggcgatttttatgagcgtagcgcaccagatcattggattacgacgctctataacaactatccgctacgaagaatcactcctcatggctttagacacacactggctactttactaaataatagaaaaaataatgcaaacattaaagatatacaatacttgctcggtcataaaaaagcttcaacaaccatggatacttactctcactttacaaaggaaaatgaagagcatgttgcggaatcgatcaacaaattggatatataaaaagagctttttacgtaatttttccgtaaaaagtctcttcactatagttattactgccgatttattgctgttaagcattgatatatcgacatttattaaattttgttttgcttaatatcaataatatgaccaattatttcactaatcaattgtctaacttcacagctacaatgccgttgtgtatttaaattctgcaataatcgctgattctgttgggctagttttcgacgtaaatcgtgatcttctgtttccattattaccactcctttttcttgctctacttcagtttaaagggtaagcttatcaatgtgcaaagcttataaggtatgaagtataataacaattgtttataggtgatttaaatggaattacgtgttttaaattattttgtcgctacagcgcaagaattaaatatgacgcgagctgcacaaaaactattagtctcacaacctgctttatcgcgtcagatagcagatttagaggatgaattaggcgttaagttattcaaccgccagccgcggcacttaaccttaactcctgcaggacagtatttatatgaacaagcaaaagaaattcttactttagcttccaaaaccaagagtaacctacaatctagtgctgtcatcagtggtgacctaactattgctgccggcgaaagttttgccatgcaacgtctaatgaatatcgtcagcaacattattcgggattatcctacagttaaaattcatattctaagtggcgattatgaatttgcagaaaggcgtttagatacaggtgcagttgattttgccgtaatcattggtaatctacctttagataattatgcttctctgcagctccctgagaaggatacatggggcgttttaatgactaaggatgatcctctagcaaaaaagagtgctattacagctgaagatttagttggacgaaacgtcttaaattcacaacaagccgaaaatcgaaagtactttgattcatggttcggtaattataaagagcaaattaatatcatcggtactgttaacttgaatttcaacggtacacttttagttaaaaataaagcagctattatgctcacactcgataagctagccaatatatcagatgaatccaatctaacttttagaccaattactccaatgttaaaacagccggtaacagtaatttggaagcgagaaaccaataaatcacctgtagctgatttattcctaaatcgtttacgagcatcaattgatgacgattaacaaaaataacctagatcgaattgatctaggttattttttactttatttctttttacgactaaaacgttgcttcaatcgttgccataagcttaatgccctgcgcatatgatcagctggtacatattttcttattgctcgcaatacctttttggaatcacgtgccgcaaaaacaaatttaccatttgacttagttctgatttcaaaacgcggaatataacgtccaccaaagcggacatctgcaaccacataagttacttcattccaaggaatctgaacataatcttcaacgtttcgttcgttataaaattcaaaagctctatcgccgatcatgattttgccgtatgatgcaattcctctaaaccaggttgcatcaacagtgagatcgacttttgtattaattgacttagccatttattaaagaatgccccatacgtggaagagaacaccgacaacgaagataccgatgataatccagattggtgaaactttcttcttcaataaccacatacagaagaaagttaagagcaaaccagctaaaccaggaattaattggttcaagttgtcttgtaaagtagtaactttagtactgcttaaagctttaccgttacccatatcccattgttgaagagcggattggatacctttagcacctgatggaagcttgtcccattcgatgtaaccacccttttgaataggagtttgagaaacaattggagtgaacttgatgtttacccaacgttcaattaaggcacccaagacgaacatacccatcattgaagcaccacgggtaaccttttgaagcataccacctgacatatcactggtgatagctgaaccagccttgtaaccaaattcttgtgtgtaccataagaatgcgattctgataatattccagataacgaagaacaagataggacccattacgttacctgcaatggccattgatgcacctaatgcaccaacaattggacgaacagtgtaccagaatacagggtcaccaacaccggccaaaggtcccatcataccaaccttaacaccttggatagcgtcatcagtaacttctgcaccgttagccttatcttcttccaaagccaaggtaacaccaagaacaggtgatgctaagtatgggtgagtgttaaaaaatactaagtgtctttgtaaggcagcagataaatctttcttgtttgggtataactttctcaatgctggaatcattgaataagcgtaaccaccgttttgcattctttcatagttccatgaaccctgaaggaattgtgagtgccacataacgttaaaacggtcgcgcttggttaatttagttttcttatcagccattatataaatcctcctctatgcgttcattttaatagtcatcaatgatatcgccgagtggatcgccagtgccggcatcgccagaattattgtttccaccgttgccacccttagcttcaagagctaagtacatcaaagccattgaaaggccaatagcaccaagggcgatcaaagttaagtctttgatagcagcaagggcaaaaccaattgcgaagaatggccatacttccttacttgccatcatgttaataaccatagcgtaacctacggctacaaccatcgcaccaccgatagtcataccttcgtttaaccattgtggcatcattgcaagccaacttctaacagtacctgaagggattgctaaaagaagtgcagctgggatagcaattctcaaaccttgtaaacatacggcaatccattgccataagttgatcatacgccagttacccttcttagcttctgcgtccatgatgtgaacgatagcagttgaaatagtacgtacgatcatagttaagaacaaaccagcaacagctaatgggatagcgataccagtagcagtaccaatacccttaataccttgaccaccttcgatcaagataatagctgaagctactgatgctaaggcagcatctggtgcaacagcggcaccaatgttagcccaacctaaagcgatcatttgtaatgaaccacctaaggcaacacctaaatccaagtgaccggttactaaaccgatcaaagtacaagcaactaatggttggtggaattgccattcatccaagataccttccataccggcaagaaaggcaacaaacacaaccaaaatcatttgaatagcgttcatttatttactcctaattatttattactttttttcgtcaagtaaagtttgagccttcttcaagatagcatccatattacctggagcatctgaaggaacttttcttacatcaaacttaacgcccatcttttcaagttcacggaatgtatcaacgtctttttgattcattgataatacgttgttggcgttaacatcgccttccttatatgacattgaaccaacgttgatattcttaagatcaataccgcctttgatagccctcaatacatcttctggattttcaaacaaaagaagtgcatgagtgtttccaaatcttggatctttagcaatttcttgcatcttcttgagtggaacagtatgagccttaacacctgctggtgcagcttcacgaatcatactcttacgtaaatcatccttagctacactatctgaaacaacaattactctatcaggcttcatagctggaatccaaccagttgccacttgaccgtgaagcaaacgtgaatcaattcttgccaaaacgtacttgatatgaccatcaccaataacagtaccttctggaatgctcttcttactgcccttagcagcagctttgtcagctactggagctgcagcagccgtcttaggcattaagtcagctggcttagtcttaattccatctctaccaggttgaacaactgcagtggcgatgtgctttgcagttgcattagcatccatcattctctcagtcaatgcttgtacaaccattggtaaattcataccagcaacaattgcccatttatcatgcttttcagcaagtccatttgcttggttaaatggagtaccaccccataagtcaaccaagaacaaaacttcatcttggttatcaaatgaagcaattgctttttccattttgccacgaatgtcatctggaccttcatcaggctttaagataacatgtgcaaaattatcttgttcaccgaaaagcatttgtgcagattgtgcaataccatcggcaaagccaccatggctggctaaaacaattcctaccatgtaatttcctcctctagatcaaaaaatgaatccgcttttattatacgataaatatagactttaaaaaagtgttttttgaaaataatttcataaagtgccaatttgtttcaagcagtccaaatgccttgtctcccaagcaaagacagaaattagtctaataaaaaaagaaagcctgttttcatgatttgagtcgtttttcacaaatttggcttcctattaaaatatatgctggttggataatttcattttcataaaataacaaaaaaggaagccttccgcttccttctcccctttactccggctgtcagactcgaactgacgacatcttgattaacagtcaagcgctctaccaactgagctaagccggaatattaaaaaagagcacggcagcttcctttcctcgcaggcagttgcccaccaactactttcggcgttaagaagcttaacttctgtgttcggcatgggaacaggtgtatccttcttgctttcgccaccgtactcttttgagcttttacactcaaaactaaacataatccttctcgcaaaaaaccttccagtttgcttcgctttggtcaagtcctcgactgattagtactggtccgctccatccttcacaggacttccactcccagcctatctacctcatcgtctctgaggtgtcttactgcttacgcaaaggaaatctcatcttgaggggggcttcgcacttagatgctttcagcgcttatcccttccgcacatagctacccagcgatgctcctggcggaacaactggtacaccagcggtgcgtccatcccggtcctctcgtactaaggacagctcctctcaaatttcctacgcccacgacggatagggaccgaactgtctcacgacgttctgaacccagctcgcgtgccgctttaatgggcgaacagcccaacccttgggaccgacttcagccccaggatgcgacgagccgacatcgaggtgccaaacctccccgtcgatgtgaactcttgggggagataagcctgttatccccagggtagcttttatccgttgagtgatggcccttccatacggtaccaccagatcactaagtcctagtttcctacctgctcgagttgtctctctcgcagtcaagctcccttatacctttacactctgcgaatgatttccaaccattctgagggaacctttgagcgcctccgttacactttaggaggcgaccgccccagtcaaactgcccacctgacactgtccctggcctggcttacaggtcgaggttagagcatccttcaaacaagggtagtatcccaacattgcctccaataagactagcgtcctatcttctctggctcctacctatcctgtacatgtttaaaagatactcaatatcaagctacagtgaagctccatggggtctttccgtcctgtcgcgggtaacccgcatcttcacgggtattataatttcaccgagtctctcgttgagacagtgcccaaatcattacacctttcgtgcaggtcggaacttacccgacaaggaatttcgctaccttaggaccgttatagttacggccgccgtttactggggcttcaattcaaaccttcgcttacgctaagctctcctcttaaccttccagcaccgggcaggtgtcagcctctatacgtcatcttacgattttgcagagacctgtgtttttgataaacagttgtttgggcctattcactgcggctaaccaatctcttggctagcaccccttcttccgaagttacggggtcattttgccgagttccttaacgagagttctctcgctcaccttagtgttctccactcgactacctgtgtcggtttgcggtacgggtatgtcatctctggctagaagcttttcttggcagtgtgattaccacaccttcgctacttttaattcactcctcttcacaactcgtgttgctggttagaagcatttgactcttaaccgcacttgttgcttgaacatcgttccatcgcgatgcgtgcttcacctcctgcgtccctccttcgctcttaacgatttgacacagtacaggaatctctacctgttatccatcgactacgcctctcggccttgccttaggtcccgacttaccctgggcggacgagcctgccccaggaaaccttagtctttcggcggataggattctcacctatctttcgctactcataccggcattctcacttctaagcgctccattgatcctctcgattcaacttctccgctcttagaacgctctcctaccacgtgctctttaaaacacatccacagtttcggtactatgcttagccccggtaaattttcggcgcagcgccactcgactagtgagctattacgcactctttgaatgatggctgcttctgagccaacgtcctagttgtctacgcaactccacatccttttccacttagcatagatttggggaccttaactggtgatctgggctgtttccctttcgactacggatcttatcactcgcagtctgactcccgtgtatggatatctggaattcgtagtttatctggattcagtaacccctgacgggcccctagtccaaacagagctctacctccattatcctctccacgaggctagccctaaagctatttcggagagaaccagctatctccaagttcgtttggaatttcaccgctacccacaactcatccccgcaatttttaacttacgtgggttcggccctccagtgcgttttaccacaccttcagcctggtcatgggtaggtcacttggtttcgggtctacgtcacctaacttttcgccctattaagactcgctttcgctccggctccgtcttttctgacttaacctcgctagataacgtaactcgccggttcattctacaaaaggcacgccattgcactttaatgtgctttgactacttgtagacacacggtttcaggttctttttcactccccttccggggttcttttcacctttccctcacggtactggttcactatcggtcactaactagtatttagccttgcgagatggtcctcgcggtttcaaccgggattcctcgtgtcccggcctactcaggattctgctaggcgtgcttgagatttcgcttacggggctctcaccctctctggcttaccttcccagataattcaactatctcttacactgccacgtcgcagtcctacaaccccaaatgataaatcacttggtttgggctctttcctcttcgctcgccgctactaaggaaatcgatctttctttctcttcctgcagctacttagatgtttcagttcactgcgtcttcctttgattagctatctattcactaatcaataatgcatctctgcattgggttcccccattcggatatctccggatcactgcgtacttaccgctccccgaagcttttcgtagttcgtcacgtccttcttcggctgttagtgcctaggcattcaccgtgcgcccttttctacttgaccttactcaagaattctcttctcggtcgctctacaatctgttctctttgattgtctcggttttttgcttggattatattcagttttcaatgtactagctctttttgaggtactaccctcaaaactaaacaaagtttctcagtgtgcttccgcttgctctggatacttctcttagcattcctgctctccatatccttcgcttccttagaaaggaggtgatccagccgcaggttctcctacggctaccttgttacgacttcaccccagtcatctgccctgccttagacggctccttcccgaaggttaggccaccggctttgggcattgcagactcccatggtgtgacgggcggtgtgtacaaggcccgggaacgtattcaccgcggcgtgctgatccgcgattactagcgattccagcttcgtgcagtcgagttgcagactgcagtccgaactgagaacagctttcagagattcgcttgccttcgcaggctcgcttctcgttgtactgcccattgtagcacgtgtgtagcccaggtcataaggggcatgatgacttgacgtcatccccaccttcctccggtttgtcaccggcagtctcattagagtgcccaacttaatgctggcaactaataacaagggttgcgctcgttgcgggacttaacccaacatctcacgacacgagctgacgacagccatgcaccacctgtcttagcgtccccgaagggaactttgtatctctacaaatggcactagatgtcaagacctggtaaggttcttcgcgttgcttcgaattaaaccacatgctccaccgcttgtgcgggcccccgtcaattcctttgagtttcaaccttgcggtcgtactccccaggcggagtgcttaatgcgttagctgcagcactgagaggcggaaacctcccaacacttagcactcatcgtttacggcatggactaccagggtatctaatcctgttcgctgcccatgctttcgagcctcagcgtcagttgcagaccagagagccgccttcgccactggtgttcttccatatatctacgcattccaccgctacacatggagttccactctcctcttctgcactcaagaaaaacagtttccgatgcagttcctcggttaagccgagggctttcacatcagacttattcttccgcctgcgctcgctttacgcccaataaatccggacaacgcttgccacctacgtattaccgcggctgctggcacgtagttagccgtgactttctggttgattaccgtcaaataaaggccagttactacctctatccttcttcaccaacaacagagctttacgatccgaaaaccttcttcactcacgcggcgttgctccatcagacttgcgtccattgtggaagattccctactgctgcctcccgtaggagtttgggccgtgtctcagtcccaatgtggccgatcagtctctcaactcggctatgcatcatcgccttggtaagcctttaccttaccaactagctaatgcaccgcggggccatcccatagcgacagcttacgccgccttttaaaagctgatcatgcgatctgctttcttatccggtattagcacctgtttccaagtggtatcccagactatggggcaggttccccacgtgttactcacccatccgccgctcgctttcctaacgtcattaccgaagtaaatctgttagttccgctcgctcgacttgcatgtattaggcacgccgccagcgttcgtcctgagccaggatcaaactctcattttaaaaagtttgaatgattgctcattccttatttaagatctttgtctcaaatttattgctcgcgaattgacttcgcttcttgtttgggtttttacacccgcacacttttagcgaaactttgttcagttttcaaagtactacctctgtcttgcttttttgcaaagcagacagctttcatattttatcaaaccatcatttctttgtcaagaacttttttgatttgttttttcgtcttactcaagctttttctgctttcacctgacgacatttaaatatattaccagcttatttacttctttgcaagtactttttttctttttatttgttttctttccttgcatgtctgtttttaagctctcgtcgcatctctcgaagcgactttattaatttaccttattttctccgctttggcaagtcttgctcttcgttcgcaatcttttagaaacgcttggacgcgctgtaattatttctttatttctatttcaatctacctttttctttttgcttactttatttttatccttacgcttattattcgagttttactgttttttctcttaattttagtacaaaatttttcgaaattttttcaaaataattcaaaaaacagtgttttgcctaatttttcactcaaaaatgcaaaaaaagacgtttatcaaattgatatagtcctactttagtagacagtacaaatatataaaattgtactatctatgaaagcaggactttttgtatgtctagaaaaagtaaatttagctatgaagctaagcttaaagcagttaaacaatacataagtggcgaagcatcacctgcttcaattgcgaaagttttaggggctggcaagactacactgcgccaatgggtatatgcatttaaagatcatgggccagaagcattaagaccacataaatataatcaaagatacagtaaagattttaaactcaaatgcatagctgcctatttaaatggcgaaggctcatatgattatctaacaaataagtttggtttgcgaagtgctgcacagttaaagcagtgggttatcaagtataatagtcatcaagaactcaaggactacaatcctattctggaggcttatatgactaagagaaaaaagacaaccctagaagaacgtaaacagatagtgaaatactgcaaggatcatcaatggaactacaaggaagcagctcttaaatttggctgcagctatgcccaagtatacaactggtcaaaaaaatacagcgcaaagggaactgacggcttagcagataggcgcggtcatcgtttaaaagaagctgagctatctgaaactcaaaggctaaagcgtgaaattgaacagcttaaaaaagaaaatgatattaaagaccaagagatagccttcctaaaaaaagtgaaggaattagaaaggatgtgtttgctggacagccaaaacaaagacaaatagcacttaaacaacagcagcgaaattctctttacagtttgatcaaagaatgtcaccgagaatataagtggtcaattgaatggatgtgcaaacaagccaatattgcccggtcagcctactacaaatggcttaatcataagccaagcaaacgtgaactaagagatcaaaagattcttaagcgtattaaagaaatagctgagagcaataacagcctctttggttctcctaagatgactttggctttaaacaatgagctagcagacggtgaggccaaaatataccgtagaactgtggctcgcttgatgtgcgtgaatggcatctatactagcaaggccagatttaataagaggtatcgctatcaagctgctagaccggaagaaactgccgaaaatctattgcatagagacttcaatgccactaaacccaatgaaaaatggtgcactgacattactgaagaaaaaattcctggaacaagtcaaaagatttatctctgtactatctttgatctatatgatcgtttccctgttggctatgctttaagcaagcgcaatgatacagccctagttaacgctgctctgtcaactgcttggaaaagagagcccaatagtcatgcaatgcttcatagtgatcgaggatttcaatttaccaggatgccttttaagcatgagctagaagaacatggcatgccacaatcaatgtctagaattggccgctgtattgataatggcccaatggaaggctggcaaggtttaattaaagaaatgcgagaagttctttatccgaaggcaaatagctatgaagagatggaaaaagcctttaaagcaagtattgaatactatacgcgtggtgctagttaaatcgttctagacaatatgtcatattataagctaaaatagctatttctagccgttgttgaaaacctactaagctcctggctcgattattctcagcattgtaatagctaagcaaagaaaagtcgctttcgattgttcttctaattgccattaactgatgatcattatgctttttagcacccctcatgtttttacgatatggtgtccaaagcacgtatcccatacgctttagcttggctgctaagtcttttcctaaatagccttcatctcctaaaagataatggttaattggatgagcattgatcatcaattctaccgtctcttttgcatcatgtaccgacgccttagtaactgcgtagtcaagcagatagccatcatcactcactattgcgtggactttgaagccataatagtagatttttttcgtcgctttataaccaatatcggctatgccacggaagatcttaacgtgataattgcgaacaggctgacaaactggaatcggaaaactgtcgataatcaataattctccacctacctttacttcctgattccaaccctgacggatacaacgaattagaggcaagagcattcgagctcgacggttaaaacgagaatgagataagccaacgaagaatttacagaatcttcgttgagattcaattccaatttcagtttgccaaatgagcatcgctaagatagaactatcaggaagcttggtctgatcaacatttttacgatgtttaagtccatcaggcgcataaagcttatacagcgagcgacaaatcacatttaaccgattaaaactaacttgtaaatggtgagaaaaacgattaagcttgagatagttcaattagatcagactcttttctatttaaattacttacaacttgagtctagtctaattggacttttttattaactaaaacgatttaactagcaccacgcgtaatactatattaattatgatcctcaggagcgcttcaatggcaagagcgcaggtcaggttagaaaagaagctaagaataatccagagaatataatttcatatccaataaaacaagataaaagatataaagacttttggaaaaagattgatgaaaagaaaaatcagctcgcacaatagcgaactgattaatcaaattaatttatatatttaagctgtctacttgacacggtacggatcaaatataatcattcgataaacgtctcattttatatctttagatgatcaatctttagtgtctattcatcttttttcttacgtttttcaacgccaagtaaactaatccaacctaaaccagcgagtaatgtaccaatcaaacctagtgtgtgtttgtgttcactaccagtttgaggcaataaatcttgcacggacttcggttttgcatttaatttgttagctaattgctttctttctgttttccctattgtcctcttgccagattcaatgtctgctgccttaactgggccgttagcgcgtttctttcgacctgtaggcataccttcatgcttaggattgttattagagtcatagcccttcttatttgctttagaatgattatgcttcttttcactttccttatttggctttgccggtttatctggcttcggctctggatttggttttggcttcggttgaggttctggttccggagtaggtacttcatcttgcttgtaagtaattttaatattactgtcagccgtatctactgaaaccttttccgctgccaccttactttgtgaagcagtgtagccactaaatgttggagcagtatatgcatcccactgagtattaccatctaccctccactcactgtatgtaactttgccagtaactttatcaaacgttactttttgcgtggtaatcagcttaccacctgaaggcgtaatgactgtaattattctagttggagtcttagtaaaagtatccaagtgatcatagttcttacttggatcaccttgcactgggcctgttggaacatcccttggtggagtttctggagtaacgataatggtgtcgtgttcaacccttacagttacagttggaatgccatcagcagttgcaactactgtcttagaaatatcctgtcctgaaacaatcttccatcctgctagagcttgtggatttacatctactgtttcactggtcttgccactaagcggagtttgccctacttctttgccatcactatcaacgtaagaaatcttccccgtttgagtgttgacagtataagtagcagtgacttcactattggcaaccagctttccagtaaccaagtcatatacggcagtccgcgtaaattcaacggtctgtttcttttgatcttctgaaatctgagctagttggcaattcttgatctggtgctaactcgtagttctctggaagcttcaaatcaaggttatcaacagttgagccagcaacgccagacttagtaattgtctgacccacttgcttgttaccttcttgagtatcttcaaattcaatagttaaagttgcatccaaagtaaacttagcctttgaagaaatattcagcttgtagtttggatttgctttttcaagggcagtaatactttctggagttaagttaattacataaacgccagattcagctggaattccatttgcaaattcataagtcaaacctgccggaactgtaatagcagttggaacattaactttaaagtttgttccatcaattactggtacagtgctttcttgactaccagaaatcgttacattttcttcagctggactaattacataagtgaattgaccactttcagaaactgcatagttaggattatcatcttgcaatttcttcaatcccttagcagttaaggcaatgtagtaagtaccggcatttgttggcgcagaaattggcttaccattggcatcgacccattcataatcaccagctgctaggttagcagtattcaacatttcaccgcttactaaaccagttggagtgaatacaccgaagttggtagcttgagtgttaatcgttgcaggttgaccatcgtacgtcttgccatctgcgcccttactattaccgtcaagaactacattaagatccttttgtttaattgtgtaagtggcagagcctagcaggtcttcagcatccaaggtgacatttccttgaccagcgtattggttaagggctttttgcaagttaacaataccattggcactcagcttaatcgtgtaagtaccatcattaactggtgcgctgccagcattccaaatataatcaccgtcttgcagagcatacgtactttcggtagttgaacctgggaaagtaaagtgaactaaaatttgaccattgctgttaacttgtgcagttgttacagctgtaccatcaaatgtcttttggttagagccattaagttttgcgtcagcagtggctgcagtaactatgtagttagctgttgtcttaaatgtccacttgtagttagcaccattattaccagttagttgcttaagcttttcttgaccagcctgtgacaatttaacttggtaagtaccgacattcgttgcattaccaacaatttgcaaatcgtcagcagttaacttaagtgtctgagcttcaccatcagcggagtaaaccgtcgcatcgtaggttacgttgtacttattcaagttaagtccacttggtaaggtttgcttagcatcataagtcttgctgtcaccactattcagggtaacagtagcttcgccctggttaatgtacccttagtagttacatcagctgctacttgtgggtatgcgtagttagtacccaaagctttttcaatgttagccaacccttgcgcagataattccacgtggtattcaccgacattgcctggggtttgatcaaagatcaagtcaccatctttagcagtgtagcttaaattagtactattagtactatttttaccatacgtatatttacaacaacataatctttgcctggatcaggaacattaacttgccaagtttgtccagcttctttaggtagactccatgaaccagaaatcactttaaatcctggcgttgttgaatcacctgctgtttgatcccattgccaattaccataagtaatcgtgttattagcaacatttaaactaccagtctgggcatagaatacctgtatttgtgaatcaggtgcaaattgttgaccatttttgtcaccaccagcaattacatatttagccgttactgttctcgcttgctgttttactggaatatacaaaacagtgtgaactggacgggcttcataaactgaggcgttctcagtatatgctagaaactccttaccctcactagatgtatcttccttattccaagttgggtaaacaaattggtttgctgacctggatcgccgctcttattgtaagcactataagaaacttccttattattttgagtagaaacatctttagtatcttctagactagtagcttttttatcttctgcctgtttagttgaattctgctcggttgaatttttgctagtcaaaggatcggtaccgctaacttctttttgagcagtagtatcgttatcattcttaccagctgtcgtagtctgatcatttccagtatctgtggtagtcttcttagccgactcaacctcttctgtttctactggatccgtagtatccgcatgaaccgtttgacttgtattcatcgtccaaagcaaagttgaaagcaaaacggaacaaactccaatgttcaattttctaatactaaagcgctgcttgccttcaaagtcatttttatttagtctttctattacgcggttttattctattcatctattttaacgcctaacataaatcacaacaaaaagcaggcttaaattatatgcaaaaaaatcgttattttaagttgtcagtcacaacaactaaaataacgattttgcttttttaatctttaattacttaaattaaacctgattccttagtaatcttcttcataccattcatgtaaggaacaagtacatcaggaacagttactgaaccatcttcgttttggtaattttccaaaatagcagctacacaacgaccaacagccaaacctgagccatttaaagtgtgtgccaagtgaagcttgccgtcttcatcacggtaacgaatttgtgcacggcgagcttggaagtcagtacagtttgaacaacttgagatttcacggtacttgtcttgtgcaggcatccaaacttcaaggtcgtaagtcttagcactagtaaaacttgcatccccagttgaaagagcaactacgtgatatggcaagcccaacttttgcaataagtgttccgcattatgagttaacttctcgagttcatcccatgattcgtcaggcttacataccttaaccatctcaaccttacggaattcgtgcattctgatcaaaccacgagtgtcccgtcctgctgaacctgcttcacttctgaatgctggtgacaatgcagtaacattgattggcaacttgttttcatgaataatttcatttctgaagtagtttaccaatggaacttcagcagttgggatcaaagttaagtcacgtggcttatctggatcgtcattatcaacgatggtataaacatcttcgtggaacttagggaattgaccagttccttgcattgatgcatcgtttaccaagtatggtgggataatttcggtataaccttccttagtgttttcatcaaggaagaagttgaagacagcacgttccaaaagcgcaccagcaccgatgtagtaaacaaaacgtgcacctgaaacctttgaagcacggtcccagtctaagatgccaaggtcagtaccaatatcccagtgagcctttggcttaaagttaaattcagtagttgggtgccacttacgaacttcttcgttgtagctatcgtccggaccaattgggtctgaatcagctgggaagttaggcaatctaagcaagatgtagttttgcttttcagttaattccgcaacttccttatctaagtctttgatttccttacctacttcacgcatagcagcaattgcatcgctagcatcttctttgttacgctttttttctgcaatttgcttagaaacgtcgttacgcttagcctttaattgttcactcttagtcaaatccttacgacgcttagtgtcgatttcaactaattcatccaattcttctggcttaatgccacgcgtagccaatttcttctttgaccagtcaagattctcacgaatcaccttaatatcaagcatataaaacctccatgatatgcataaaaaaagagccgacttatccctacacttgggacgaatcggctcttacacggtttcgcggtaccacccagcttcagtctatctagactgcacctctttaccagacgagtaacgacgtcaaaccgtgcaactattaattgcccacattattgaaatctggaagcgactatgcattcactcgcaccaaccgtgaactctctgaagcagtcttaggatttcgtgtttgcatttattttaagccattcttcttttttgagcaaataatatttttctttaaacgaaaaaagtgcactaacttgtgtgtaatcgacagtataaacatactgaaatcctagtgttttaagcaatttctgtgatttttcattatcggcaaaagttccagcccagacttctacttgctttttctttttaaaagcataggtcaaaatcaatcgtaaagcttcagtcatatagccgtgaccttcaaacgactgatctagcaaaaagccaacttctttagtctttaataggccactcttttcatctaagccgcgttcatacaattcaaccagaccgatcacttcattgttcttgcgcaagcaaacgacataactttcaggacgcgacatatattgcttcacgccattaaccgcctcagtcagattgcggtattcctcaaagccagccatcttgtggtagcggggattgccaccccacttcagtaattgctgcgcgtccctttcttcaaaaggtctcaaatatattctcttagattcaagcattagttacccatcagcttcaagagccactttgcaccaaactgtaggcctatactataggccgcaattgtccatggcttacacaaaataataatccaaaaataagtccaaaacttcattttagtcaatcctgctagcaggcaaagcacgtcatcgggagctgctggggcgagaatacataatgcaaagaaccaattaaatttattctgattctctgtccacttcatatatttatcaagcgtttcttccgaaacaatatgcaaaataaagggccggccgtagtgtctagctaaaaagaagttgataattgagccaatacaaatccccacgtagttataaataaacccagcaactgggccaaagaagaccacgcctcctaataaagacacgcccccaggaataatcggaataactacctgaacaatttgaatcaacacgaaaataatcggaccaacaatttgtttattagccagataagcccgcattttagcttgatcggtaaagatccccaagcggtaccaataaatcaccagcaacacgattgcgactccacaaactatagttgcaatattgattaatttacgactagccttagtcgatagatgcattttctcgccttccttcatcgcctagtagttcaattttaacaaaaatccagcccagataccgtaaacatgcaaatctaaaaaaagttttattattttagctactttgggcagatactatataataaagttaataagttattagaaaggtaggcatcttatggttgtaattaagaatgatattgtttatgacaagactaaagaattaaaaacggatatttactatcctaatgatacatcttctaataccaagattttaatcttctggcatggcggtggctggtttagaggtgataaagacagcgtcaaaaatctaggtattcgctttgctaatgcgggctttatgaccttcatccccgactactccttagcacctaaataccactttcctgctgctcatgaagatgcattgcactttgtcgactggctgttgaattctgaatacactgatcaagacgatatcaaaaacattgttcaaattggagccagcgttggcggtgaaatggcaattgaggttgctgggaaatacggtttccctactgtcacctggtctgctccagttgaatattcaaactggattaaagatcatcaagatactaaagcatccccagatgccgctaacgattttggcattaccgatcctgaaaagatcagacaatctttctacaagcacttcacattaacctacacaggtactgaagatgaggctgtattacaaaaattagacgctaagtcatttgactatagccatctcaagcaattaatgatgattaattccgcagatgagttgacaccactagctacagtattggattttgttaagttcttagctgacaaaaacttaggcgtacagctcctcgtaattcctggtcacggtcacgccatggcctatggtcccgattatgtagacgaatcgctcgattttttatatcaaactattaagagacaaaattaagtatgattaacatccaaaaattcgttcaagtcagaaaaaaactaaagttatcacaaactgagctttgccaaggcatttgtacccagtcgaccttaagtaagtttgaaaataatgggcaagtgccttcatttaaaattctcaagcagctttgtgaacggatggatattgatgttagcgatattatggacagcagtgagcacaaatatatcgcgcatatcctgtttgaagcggattttgcttttatcaattttgattacagtaaaatttttactttactttcacaaatcaaccccgaagtagacctaaaacgccaaacaaatcggattcattatcactatttgcgcggacaatatgctctaagaagtgatcgcaatcaaatgcaatgtcattaagttaagacattgacaattaagggtgcttttttagagatcgaatcatttggattcgatctctttttttgtataaaataaaggcgaaaagaccagccttttcgcctatcttatatattatatattttaaaccttcaaaattattgccagaaagatggtgttaattatgaaagcccttcataagaatattctagaacgtcttgatcaaattatcaataatactggggatcatattcacgattttattaataatcctcatgcttttaccaggaaacgcactttagatgcagcgacagtccttaaaactacaattaacatgcaaggtcagaatttaaacagtgaactctttagagcttttggcgaagatgcaactaaaaagaacgataaagtagttagtacttctgcctatgttcaacgcaaaagccagctttctcctgcttgttttaaacatattctgactgtttttaatcaaaatctatttaatattcaactttttgatcatcactaccgtttgtttgccattgatggctctgactttaatcaaatctggaatccgaaatcgaataacattgtacaagcttcttctcataaaaagaaaccctattgtcaaattcacgttaatgccttatatgatctattgaataatacctaccaggattgtatttttcagcctaaatcagaaatggatgaacgcaaagcggctgttcaaatgcttaaagctttgaattgtggtccatatattgtaacaatggatcgtggctacactagtttcaatatgattgaaaactgcaatcgcctgcctaactgtcattacataatacgaactaaggctggacaaggcggagttaaagaaataacgacattgcctgatcaagaatgtgatcgtgagatttcctgcctggtaactacttctaactattactacatcacgcataaagccagtgagaatattcaccatgtccagcatcattatcgccaatatattaagtatcgctctaaaaatacccaggatctaagctgggattttggcgagttatgcacaataaaatttcgagcctgcaaatttagaattaatgatgccaaatcaggcaaagaagaatgggaagttgtgctaaccaatcttgatcgaaaaaattatccgctaaaaagaattaaagagctttatcatctgcgttggggtattgagacctccttcaagaaattgaagtattctttaggcagtgtacagttccattccaaacaagataaatttattgaaatggaaatttatgcccatatgattatgtttaatgcaatcagtcaaattgatgcacaggcctatattccgcaaaagcattgcaagtatcaatatgccatcaatttcaagcaatcatgcttgattattcagagcatgtatttggcttcttctttaacgcaagattttgaacggatccttattcagatcagctattataccattccaattagaccaggccgcaaggacaagagaaatattaagcccaaatcagctgtatattatttatatcgcgtagcttaaaaaagcagaatctgtgctatgccttatttgttgtacgaaaaaagcaccaatttaaccaattaaatgttaaatcagtgctttaaaagtctaatattaattgtcaatgtcttaacttaatgacattgcaatcaaatgagtgcgctcttttatttcaacaatatcttgaccacccaggaattgcctgaaaatgatatttaccgcttgttggcattaaatggttgtagtcaaatctatgctaaacaaggtgaaacagagaaagccgagcactattatagtcaagtattaaagaacattatggacgtcaagatcgataatattttgactacaatgcatgccttaagtattttatgtgatgccggtgaattctatggcgaacgaaaaatgtatcgtgagtctaatgcattattgcgctatgcctataagattggcgctgagaagcacgtgattttttacatggcacgcatcctattgcggcaaggcatgaatgatattgatcagtcaaaaaagaaagcaattgctatccaacatttgcacgatgcctgtgcttttgcccgaatcaaccgcaacacgattacgctaaatcaggctaaaaaattactaaaaaaattaaatgactaagatccaatttgaaatatagtaataagagtttgttcatttgattttgcaaaaatgataaaattagtataaatgaacgctgtttaggagtttcagataggttgactttggaacgaattatcaagtttatgtttgacagtattggtagctatttatccattcgaaaaattgccaatacgttaacttcaatgggacataaaatcacaccaaatacggtagaacggtatattaatgcgttactcgacagtttgattatctatgacgtttcacgattcgatattcatggaaaagagcagctaggttcgctaaaaaaaatattacattacgcgtggtgctagttaaatcgttctagacaataagccaaattataagctaaaattgcaatttccaaccggctttgaaagcctatcagactacgtgctcgattgttctcggcattgtaataggtcagaagcgaaaagtcgctttcaattgttctgcgaatagccatcaattgatgatcattgtgctttttagctcctgtcatatttttacgatatggtgtccaaagttcgtaacccatttgttttagctgttgatgcagttctttgcctaaatagccttcgtcgccaagaagatagtaattagatggatgggtattttctatcagttcaactgtctccctggcatcatgaactgatgcctttgttacgacataatcaagaatgtaaccgtcatcgctaacaatggcatgaactttgaaaccatagaagtaaattttcttggtggccttataaccaatgttggcataaccgcgaaaaattttagcacgatagtttcgaattggttggcaaacaggtaccggaaagctgtcaatgatcaagaactgtccattcaggtcaacctttttattcatttcttgccgtatctgataaatcaattgcaatagctgacgtgaacgccgattaaaacgtgagtgtgataaacaattgaaacattcacagaatcttctttgtgattcaattcctgtcttagcttgccagataagtaaagccaaaatcagactgtccgtagttttaatttgatcaatatttcgccgatgagtaaactcagccggtgcatacaaacgataccagtgccgacaaattatcactaaatctttaaaactaacttgtaaatggtggctaaaacgcttaagcttaaggcagttcaatcagatcagactcttttctattattactatttacaagtcgagtctaacaagattggacttttttattaactaaaacgatttaactagcaccacgcgtattacattgttgatactgggcttagatatcatttgttggcaaatcaaaaaaagatcgtggacatataattgaaaatattgtttatcttgagttgcttcgtcgtggatataacgttactgtaggtagcatccctaatggtgaaattgattttgtcgcaagaaagaataacgaaattttttattatcaagtgtccgaaacagtgctagatgaaaagaccttagagcgcgaattgaaaccgtttaacaagattaatgatcattatccaaaatttctattaacaatgaatgaatttggcaaaaatgataattttaacggaataaagcaacttaatattttagattggttattagaataattaagctaagattaagaataataatttaaaaaaagaattcgaaaaatccccatttgtagtgaaaatgcctacaaaatggggatttttttagataatcttgtaaccagtaactggcttagcaggtactgtattgaaatcaaagctagcaagtttgtccagttcagtattaccatcaataattgtagtaacaccttgagcaatcatcaggttcattactttatccttgtctagatccttagtgaaggttaccaagactacaggcttatgcaaagcacgcatgaaaccaatttcaaaagcactaccatcatctacattgtccatgtcatacaagaagacgccacatgtagagttaactagaccttccaggtcattgttataagtggcaaggcgccaagtcatgctgcgaatgccaccaatttcaggattcttttcatccggatcaacaaaattttgatcaaatggaaaatgcactctgaccactgtcggattttcttctaacaaggcacgagccttatcaactcgagcacgttgatcatcattgtaaaatggagtgcctaaataaaccttagcagttgaaacttgtttgttcatgcttttgtcccttcaatgtttaaaacttacaaaataaaattatttttcattttagcatgacttttttacaactaaaagcacaaatagctgtgttttcattgtaaacgctttataatagaaacataacttattaaagctaaacataaaacttattggaggaattattttgtctagatatcaatcaattaatccatatactaacgaagaatttgcaagctatgacaattctactgccgcacaaattgacgatgccattaacttagcacacgctttatataaaaaatggcgtcatgaaaatcctgagacccgcagtcgtcaattacacaagatagcagatgctttgcgcgagcatgaagatgacttagccaaaatgatgaccctggaaatgggaaagcttttgcgcgaatcaagagaagaagttgaattatgtgcttcaatttgtgattactatgccaaaaacggggtcaaaatgttggctcctactccaatcgaatcagacttaggcaatgcctattatttgaagcaatcaactggcgttattatggcttgtgaaccatggaatttcccactttatcaagttattcgggtcttcgctcctaactttatcgtgggcaacccaatcttactgaaacacgcccacaatgttccaggttctgctgctttaaccgctaaaatcatcagacgtgctggtgctcctgaaggcagcttaattaacctttatccaacctatgatcaattaagcgatattattgccgatcctagagttcaaggcgttgcattaactggttcagaacgtggcggttcagctgttgccgaagctgctggtaaaaatttaaagaaatcaaccatggagcttggcggcaatgacgcatttatcgttttagatgatgcagatccgcaagtattgcgtaacgttttaggcgatgctagaacttataacgatggccaggtatgtacttcatccaagagaattattgttgaaaaatctcattatgaggaagtgctacatacgcttaaaaacgtcttttctaatcttcaagcgggtgacccacttgaagccggtactaccttgccaccaatgaattccgaacgtgccaaggaaaaattagaagctcaggttaaaaaggccgttgacgcaggagccgagattttttaccaatatccagagattgattctaaaggtgccttcttcagacctgtaattttgactaacatcgacaaagaaaatcctatttatgatgaagaattatttggccctgtagcagaagtctttgtagttgacgatgatgacgatgccattcaacttgcaaatgattctagctatggcttaggttcatctgttatctctaacgatatcaaacgtgctcaaaacgtggccgctcaaattgaaactggtatgactgtcatcaatggccgctggattacctctggtgaattgccatttggtggcgtgaagaagtctggctacggtcgtgaattaagtgacttaggcatgatggcctttgttaacgaacacttagtaattgatgttactaagaataatcaatagtaatttttcgataaaagaaacatactaacctagtgttggatcatgaatcgacggattcacgatctggcactttttattttgtctaaaatagaaagtgaagataaagcaaatcaagtcttcagctttttagacacttgatgtcgtaaaagaaacggactgctttaccacctattcttaagtctcttcgaagtctgtgggcacttagatgccgtgtttagaaaattagaattaataggttgataaagaggtttatcttcacagcggaggttatattatggaatcacaaattattttcggtattgatgttagcagtaaatcttccacagtttgtgtggttaatgaccggatcaaacaaggcgaatcttttagaatctctaatgattcctttggctatcaaaaactttatgagcaactgaaccaatatttgataactcctttagttgttttcgaagctactggtgtttattctctaagcctgcaagctttcttagaggattatcatattaagtatttgaagcttaatccgcttaaagcgaaaaagctaatggacaataatttacgccataataaaactgataaggtagatgcttatcgcctggctttaattcaatttaatgccccgcaaaagttgcgtgatccacagcccagagagtatcatgaacttcagaatgccagtcgctattatgaagaacttactaggagtatagttactactaaaaatcaattgcaccgcaacctccaatccactttcccacaaattgaagaaatactgtctcatccatctggcagaatttattgggcgcttgttagtcttttcccacatgctggatatgttctagaaaagaatgagacacaggtaactcaaatgcttaattctatttctggaataggacaacaaagggcacggtacttaaccacaagattatacgcttttgctagagaagcttatccttatgattccaaagatagtattatcgttagagctattcaaaggaacatttctaatttgttttcactccagcaagaacgcgactatgtaattaactacatggaaaagctggctaaagcagtaaacgctcgtgctttatccatctatttgagtatcccaggggttgctagaattacagcagtgagattagtagcagagctcggtgatctaagacggtttagcacttcagctcaaattgatgcgtttgttggcattgatccaggaaggtaccaatctggtgaaaaagacagttctcttggcattaccaagcatggcaatcatattgccagaaaaatactttatcgagttattattcaaatggagacggtaaaggctacgcagccttgccatataactgattattatgacaagaaaaaacgatcttcaaatagccaaggctataagaaaatcgccattgcatcagtccataaactgatacgcacaatgtttgctcttatcaaacatgatcaattatatgattacaacatagccaccaaaaataaaagactttagctgaaatcaaataatcaacttaagtataagcaacctatggaaaaactacaagtattcataggcttatttgtggtactttcgctttttcttaaatttaaactcttatttgctttaaccttattcgcatcattaaaacaagtaaatttattttcttaaatcattgataatacttgactttgggtagaaaatacgctggcaacttaaccagcgtatttcttttacttattattaattctatttctttttaaaaagattatatccagccaaaatcgtggtcaacacgctagccaaaatcataaagtaagctgaagctccgagagaaactgcatatgacataagttgactcgtcaattgagccagcaccccagttgaagcatgtgccgcgcttgatatttgaaaaatcatataaatcaaaaagattgattcaatcaaagaaaggaagaaggccaaagtctgactagccttagtatttttcaaaatattataaataatgaaaattgggaacaagaatagtagcaaccagacaatgtaaagaataagtgcataccatgatgtcacgccagatgaaagcaagcgccctgctaaaccgaacagtacattggaaatagacattctctgcgtgtaagccgaggcacccgagtcggtaaagagaacgattagactaactaaagccgtaaaaataactgaaatctgcacataattaaagtgatgtttgcgaacattttttatttcacgtacatgattttcaatccgaggatatttttgcacaaattctcggtttttcgctttgactttactttcacgtgcatccacccggttaaagacatcggaaccaattcggtcaatcttttgcgttaatcgcttatcaaccgtatactgctcgatcttatctttacgatcacacacaatataaagccaaaccattagggctaaaaagccagtccaccctgccgctctagaaaaactcattaggattaaaagtaagactcccaataagaagactaaggtcgcatttttcctaacccacgcaatcattctttggacagtggtgttttgcttttcaggaataaattcttcccgataggctgcacggctgataatcttttcgccttcatctggttcttcaaactttgctttttggtgctgatctgtgaaaaagtcgtctcgatatttttttagattgaagccacagtttggacaaatatcatctgtttcactaattttatggccacaatttggacaagtagtcatataaaaattcccttctttttcaatctgttagtcattattataacatgtatcagaatttgaagatcaaaacaaaaaaagaccgaatcattgcgattcggtcgaaaaaattatttactaactatttttcaacattaattggtaaaacattatcaatataaggtgaatgtccatcagcaatcaaatctgatatctttctcaacattggaaattgtatgttcctagtatcatttccaaacttttgatatgcttctggagttgcatctttatgtaataattcatatcctaatcttttgtagaaattaacactttcgtccacagattcaagataaatcagctgaacacctgtatacaatgcaatcaccatgcacatggaaaagaattccatcattagtgctctaccaattcctgttccttggtattccttgtcaattgcaaaataagcaaggtttatatatggtgtatcaactttataagtaccatcatccttcttaacattctgtgttaataaccctactgttgacgagaaaaaaccaactatctgatttttgataggatccattaatacaaaagtctttaatttctgtgtactttcgaacttcggacattccttacgaaaaaaattatctataccacgattagtggaatcaaaatgtagggctaactcttcaaaatgtggacacgtacttaacgggcataatttaaatgctctactttgattcatgcttttccttcccacgttgaattactatcccatcagcttcaacttctttttgcaacttttttatagacacacgtggtactggattggctattttgtttttgaattctttaaatgctttttcatttttaaatgttatctcagcatttctaacaatacctaccataattaccaactccttttagtgtacctattaatattatacaatcataatctgttttactattagtttcaagatttattttaacaaaaaaagaccgaatcattgcgattcggtcgaaaaactatttattaattatttttcttatttcttcttttggcgaacttattaaggtcaattccctcatatgtcaacttagtagctgctgacatagtaattggcaaaatgaagaccaagatgagcaaaccaatatccacggctaaggcaacttcaatcaaagttggaatacctgatggaatcaaggctgcaaaagtaccacccaagataattgcggctgatataacaaccgtaccaatgatagcacatgccttcaagattcttgaacttggagtagtgtatccttcagactcaagttcacgataacgagtcatcaggaagatactgtagtcaacacccaaagcgatcaacataatgaagctgaagaatggtgtgttccaagtaagcattgacttaccaagaactgctttaacaatccattgattgattgaaagtgagcagagataagcaataagtaaagtaccaagaatgtagactggttgcaataatgaacgagttacgaacatcaaggcaatgccgataccgattaacatgatggcagcagttctaaggaagtcgccactggcaactgtcttagtatcttcaatcttggaactttgaccacccatagctaccttagcattcttcaaagcagtaccttggaatgacttcttagccatagcacttaattcttgtgacttcttagtagcttcggttgcacttgggtttgaatcaaagacaacaataatttgagctgacttcttgtctgggctgaggtaaacatccattgacttcttgaacatatcgttcttcaagaattccttagggatgtagaaagtatcagcggcagctgatgaacctaaacctctgaggtaggtttcaccttgacctaaaccactattaacagtgtcaatacctgaagtcaattgtggaactttgcttgccaacttaccagcgccagcactgagttgtccagcacctgtgttaagttgactgatacctgaaataagttgtggagcttgaccagctaattggccgataccactgttaagctgaccggcaccatttgcaagtgtgccaagacctgtgttcaattgacccgcgccattgttaagtcggtttacacccgcaccaagacgactagcgcctgacgaaagtgaacctaagccactgcttaattgaccagcacctgaattaagtctttgtgcgcctgccacaccttgtgaagcagctgattgaacttgcgtcaagcctgagcttaattggttcaaagcagtagctgcacctggaagtgccttgttagaagcttgagctaatttagctacttgagtctggagagttgataattgttgaagtgatgaagttaaagcacctaattgtgagctaagtccagaaacatctatagcagcattacccgtttgagtatcagcttgtgtattactaaatgccttattaatagctgcttcagccttttgctggtcttcagtagttaagccagcactgccaatggcttgaagtgctgctcgttttgcttgtgcctgagcaccagcagctttttgactagctgctgacaattgtgctgcttgttcttgtaacttcttcaaacttgcagttaatcgtccaacttgtgaagtatctaatccactaacagcttgattcaattgttgaataccactgttaatttgtggcaaagcagtttgaagttgagcgagttgttgtttgtttgaaccactcaattgagttgaaagttgtgaactcaattgttgtaattggttaaccatttgttgggtaccactttgcaagctgctagcaccattctttaagcgatttgcaccgctaactaattggcttgcaccactttgaagtgcgtgagtaccacttgccaaacgaccagcacctgtttgtaaacgtactgcaccactttgtaattggcttgcaccattttgcaaacgactagtaccaccaactaattgttgggcaccactttgaagacgacccgtaccatcttgaagttgatctgcaccatccttcaaactattggcaccattagcaaccttgttggcacccttactcaatttgcccaaacctgaacgagcttgatcaacaccgtcgttaaccgtgtttaattgattgttgacataaagcatatcaattggttcgccgtaaggttctgtaacagatgtcgcaaatgaaacatcttttgaagcttgaagttgcttagtcacttgatcaattaacttcaaattttcttcattgtctaatctatgcttgctttgaatgtacaagtatgatggttcagccatccctttagagaagtgcttttgtactatcaacaaaccttgcttagatggaactgaatctgcaatttcatcagtgtcatcgtagttcaagtgacctgagtacattaacatgaatggcacaacaacaactgctaacacaaccaagtaaataattggatgcttcaatatggcagatgaaataccatgccataacttgtcatcactttcaccagtaaatttcttaactggccagaacattttcttaccaagcgtagccataaagaatgggttgagtgttaaaagcactaccaataaaacagcaacgccgaccgcaacaccaacagctgattggtaaacggagaatttagctaaacttaaagcagtaaaaccaattaagatggatgaacctgagtaaagaattgttttaccagcattgcgcaaagcgtcatgcatggccttatacttgtccatcccttttcctagattttctttaaacttgtcatacagcaaaatgttgtagtcggtaccgataccgaagagcacgataaccataaacacttgcgtaaagtttgaaaatgggaaattggcgcttttaactaaattagtaacaattgagaaggaagtaaggaatgaaacaccaactgtcaacaatgaaataagtggaacaattggtgacttaaatacgataaccaaaacaataaagataaagacaactgtaatggcttcagtcttcttaattccctcttgaattgaagcggagaaggcgtgctgcaagacatccgcacccgttacataagtacgaagcccttgcgttttcgcggccttgttcatttcgttataaactttttcaatcgtaccatgactcttagccacattaaattgtgctacccaagtcgtgccatcttttgattgaagtttctttcttgtagcaatattggaatctggaagtaatgaatccttgattccgtacttgcttttatcattagtgaacttatcaagcgtattattaatagcctgtttatcggcatcagttagcttgccactctttttgttaaaaacaagtgctactgcataagtgtttttctttttcgagccccaattgttctctattgactgtgccacattgctttgcacattacttggcaacgtaatgttagagtgatcattagtcagctgcgtaatgttaggcaaagcaacaacggaaataatcaatattaaaatccacgcaatcagttcaaaaacatggttcttcagaaatttctgcactttcctatttcctccctatttgttgtaaatcaggtactggttctacaagccgtaaaatcatttcatgataattacgattagattcatcttctgtttcatctccaaaagacttcgatttatccaaaaaaacgtaccctaatacggcgccaattaaagcatgaaatgaaatgacactttcttttttaaaattaagtctttcacccattttaattaaatccaagatttcttgattgatggccgcatcctttggatattcgttcaaatgatacagaatacttgataaagccggatcgcttaataaaaagtcgcgcacaacatccgcaaacttaagcaatgcatccctacctgacataccgattagatcgttcatcaactcatgacgtaagatcttaatctgtcttgcaccaactagtgatagcaattgtttgcgtcctgaaacgtaatgataaagcgactgtgagcggacatcgagcgccttagccaatgctggcaaagttgtagctgtcagtccttttttagaaattaattcagtagcttgatcaattattttatccagatcaagatttcttttctgtgccattttcatccctcctttgtcttagcatagtaaataatatacacctacagtgtgaagattacaatctacatagtgtaaataatttattttttctataaaaaaataatgaagccttctcggacttcatcatttccgttacttatgcttttttataaaccaagcattaaccgttttgcccaatttattaaaattcttgtgttgcgtgctccaaacagacatacagtaagcacgtccgttagtctgaacaattgcgacagcaaaatcatcatcaccaattgcataaatgccgccacttaagccagaaactaaacttggtcgctctttagctagggttgctaaaactcggctagcatattgccgatttaatacccgaccttgatacaagccaatcattgttttagctaaatcattagctgttgtctggccagtcatatttgagttgaccttagtttgagtggcacccatttttttagcaacttggtcaatattattaactccaatttttctagttaaggcactagctgcagttttgttacctttaagcattgcgctacgcaaataacttacaccataggtaataccaacttgaaacatcttatcacccttggctttgtcttttttgctaatcttaatcgcagttcgcgaccccatcttgcctttttgttcttgctcatacaaggcgatcagtaaaaataaccgcattgtttttcctgcgtcatgagccttattagtattaaaaactacggcaaagtgactagagttagttaaatcctgtgctactacctggaagctatcatcaatgcccataacttttttgatttgcttgactagcttctgattactgcctttttgagctttaacatggttagaatattcaatcgaattaaccttgggctccttaggcttttctaattttttaacctttggctccttggtcttctttttattcttagcgaccttgctgttatttggttcaacaatctttaactgcgcgttttccacccgctttatgtttgatgtatacaaaatgaatgcaaataaagtcacaattaaagaaccaattaatattttatgtttcattaaaacgcctcaattttagaagaaatgatgccttttcatcaaaatgactaaccaaaccattaaaacaaccatcaaaataatgattaaaacccagtcaaatgaattttttaaaattggtagactaacattcatcccataaaaaccggttaaaatagttggaatagttaataccaatgaccacacagttaagaattgcatggtatcattcaaattattgttcatcatattattactggtagctgataaagtcttagttacctgctgggaaatctgcaccatttctgcagactggcttgattcaatcaagacgtcatccaagcgttcactggcttctttagtgaagtctaatttgctgtgattcaggccatgcaacatgattaaatccgtctgaattgaacttgataaataaactaaacttttttcaatattcgaaagttccaccaaatctttattgttaatgtcatcagacaacttctgatctaggctgttacgttcaacgtcaagttgcgttacagcacgctggaagtattgtgatgaatataggaaaaagagcatcaacaactcagtaacatctttagcttcagacaaacgctcccgcatatgttcatcgttgaattcatcaaacacatagctggttgattctgtatggaaagtaaagatattttcacccactactaaaaaagtgattgggtgtgaggtaaagtgcttaatcgtgttggtcggccaaattggcacatcgtaaacaagcaagtggctcttagtatggacgtcatagtcatagtgaggacgttcgtgacggtcagaaatataagagataatgtcaggcgtaaaattaaaatcctgctgcaatctctcactgtcttcttcacttaaattattgatgtcataccacttatactttgttcttaccggaaaattttgttgtctaatcaaccagctcacctcaacttttattttattacctagtaaatggtaccatttttctcaattctttttccacaaaaaaacagaccttacggtctgctctttgaaatctaattgctatttaattttattgcttccaagcagcatcaaatttttgcttaccagtattaatttggatgttagtattttgacccttttgggctgcagcaaagatattttgcaaaatgctgttcaattggttgtatgcagcatttgaattcttagcaacaggaacactgtacaagttcttcatagcatcttgaagtttagcaggaagcttaatgctcttgttattcttgtattcactagattcgattgcactattgtttacaggaatgtaaccagtagcattagcccacttaatttggcttgacttagatactaagaacttaatgtacttaaatgcagcagctttttgttcagcgctagcgtggttaaacatgtaaatatcagtaccttgttgcatggtgtatttgccaggacgtggagcaacatcataagtaaacttgttacctacaccttgcttaacaaagccttcacctgcagaagtaccaacaaacattgcaaccttttcgttagcaaatggacctgaaaggtagtgttctgaaccagctactctgaagtaacccttcttaataccatctgcatagaagttgagaactttctttgaagttgaaccactgaagttaatcttatcagtaaagttcacgccttcgtccttcataccaagagtgtagtagttggatagtgaatcaaaaccagcacctacaactttgtggttactcttcttgtagatagtttctgaaacatccttaagttcttccatagtagttggaactttcttgatgccatatttcttaaacatggtcttgttgtaagtcaaagtttcaattgacttgttaaatgggataccgtattgagttcccttaatttttgcaccatcaagaagttcagttctaatgtcagatgcctttgcactgccccaaccaacattcttgttgttgatatatggggtcatgtttacaagcatcttgttttgagctgcgttccaaagccaacctggataagcttgagtaatagtaggtaagttatttggtgattgcaaagttgagttgatcttagcttgcaaatcattgtatgcaccttggttttcaagcttaacagtaattttagggttcttcttttcaaattcattagttaattgctttaaagtagaaccttgtactcccggcatagcgttccagaagacaactgtagtcttcttagtaatctttgatggaatcttctctgaacttgatgaagaagaattgccgctctttgaacaagcagcagtgccaactagggccaaagtagcaacggcagccatagtaagtttcttactaaacttcatttggataaatcctcccaaaaaataaaactaaacaacaatatgtttttgatttactaaagcgtgattgtttgaccacgtttaggtaaaatccgttctccatatgggttctcttccagctctggatgcaatgtgtgcaccggtactaaaacagctggttgaaccccagcaatgatttccttgagttctttttcatcggcatggcctgaacagcgcaacgccttatactcaatatcattgttagctaaagcctctacaaatggtttgtaggcaggatcaaaatcccctaatggctcagcatttgagtggatatacaaaccacccttttgcagcttatcataatcggtgacaacttgccacatgtatttatgattatctgctaaaagctcatcatagctaacttctagctctggcttaaggtcagcatagtgctcctcattaggcatgtaatagtaaggatagtcttcatccaaactttcattaatcaaatgggcacgctgagcatgtaaaacgacctttcttggtgaatcggcaatgattcgcaataatcgttcaacattagtaggataagtattaaaagtgatttggcgttcaggattagccttttgcaggcgcacgatttcttcagttagttctacttcattcttagggccagtaaactcttcactgttttcatcatgcttttcttctggccaagaaacaccagtaccttcaatgattagcatatcgctatttttagctgcctgcataaagtcccgcacccaatctggatgatagccatgcaagcgaatgtcgccagtataggcgatttgcttatccggtgtcttaactaatagaccagtagcaccgtaagcgtcatgatcactaggatatatttccaggataatatcgcccaccttaattggtttcttgtattctgccgcgatgattggacgagtataagtccgatcatgacctgcagcaggaagcaagaagtcgcccttttcattcaaggctggcaataaatgagctgtaattggacctgcataaagtggaatttctggggccaaaaagttcattgccttactgtgatccaaatgtagatgcgaaatataggccgccgcatgctcccagcggtcagtatcaattggcttacccgttaatttaggatcgtaaaaattaggcacatccccgattaatttatttttaatcagagtttgataactttcatctggcaattttaactctggccgataaacttcccccaagtcaaacaatacatgcgatttgttataggccacttcaatcatcggtccaccaattgtggttaaaccattataaaaagttactgtcgttttatcctttaaggtcattgcgcactactcctcgaataatttgctttctaaagatgaagtacaaaatcaagattggcaaaacagtcaatgtggcagcagcaagttgaagttgagtttcactacctgcatcagatgcaaatgaagttaaaccattgttcaacaatctcatgctgtcttcgttagttaccaataatggccagaggaatgaattccaaccagaaatgaaacttaataaagcaacggtgaacaagccacctttagacattggcaccaaaattttccaaatatattcccaatcactcgctccgtcaatcatcgcagctttataaattgtctgtgagattgaaccgaagtagctttgcaagtagtacatgtagaaaattgaagttaaaaatggcaataccaaaccaatataagtgttcaacaagcccattctggcaatggtattgtagttagtaaagataattgcttcaccaggcaccatcaataatgataaaagtaccatttgaacaacacctttacccttgaacttcaagttaaccatggcaaaagcaccaagcaaggcgttaaacaaactcacaattgtcgttacactagctgtgataaaagtgtttaggaagtaacgagtaaatggagcttgggcgaatactttggcataatttgaccattcaaaatgcttaggaatgattgttggtggaatagtggttgtttctctaaaactcattaatccacccaaaatcatgtagataaatggaaagacagtaatgattgcgaaaatcgctaaaataatataagcaatcaaagtgccccaacgaatcttcttcatcctttactgtcctccaatcttcttcatcatcttgcgttgcaagaatgtgacaaacataatgatgataaataagacaaccgttgcggccatcgctacacctggagtaccaacaatttggaacttgttatagatgtagaacactgcagttgtggctgagttaccaacacctgcttgtccattgaataaggcataaacagatgtataaatcttaaatgcagcaatgatattcattgttaataagaaggcgatcgttggcacaagctgcggcattgtaatacgccagaacttttcagtaccagttgcgccatacatatccgcaattgtgtagtaattagggtcaatgtttctcaaagcccccatcaagataacgatgttaaaagctaaagaagtccaaacaccaaagatgataattgtcgtcaatgacatcgctggatcatcaatccagttcggtgttggtaagtgaaccgccttgagcaagaagttaagcaaaccatagtcaccgttaaaaatataacggaatacgataccaatagcgatagttgacgtaacatatggcataaagaaagtcgtttcaaagaatgacttatgctttatcctgctgaaaataaaccaggccaacatgattgaaatagccaaagcaactggcacagaaattagggcatacaaaatagtattcttgattgcccgccaaaattctggatcactaaagatatattgataattgctgaagccactccaatttagattaattaacgagccgctttgaaaactcattacaaaggcccgcaaaattggataaatactaaagaaagtaacaaagataattgttggcgctaaaaagagccacgcctttttctgattgctcttcattagtagacacgctctccttccttagtaaacaggaatactcgatcaagacgcatcttcaaattgatattatcaccaggcttaattggtgtctcaaggttgactaatgaacgagcttgtaccccatcatgggtaaacttcaaaattcgttcacgaccgattaattcgacatcatcaaccttagctgaaactgcaccatcttcttcgactggcaaaatattttctggacgaacggataaaacgtactcgccgtcagttaagtcacgtttaaaacgatccttgtctaaatcgtccacgttaatttcaaaatctgagccagtaatcttgccgccattaacctttacattaaagttatcaatcacaggattaccaacaaaattagcaacaaagtagttatttggttcaagatagaagttttgtcctaagtcatcttgttggatcacgccattattaaagagaataatcttatcaccgattgacaaggcttcttcttgatcgtgagtaacaaacaaggtggtaatacccacacttttaactaaagcacgaatttcttcacgaatcttcaaccgtaaacgtgcatccaagttactcaatggttcatccatcagcagaatcttaggttgttgcactaaagcacgagcaatagctacacgctgctgttgaccaccagataaattgcccggcttttgatcagcaagttcggtaatctgggtcgttgccatatatttttcagcaatcttcctcgcctcatccttaggcatcttttgcttgcccacagtcagaggaaacattacattctgaagtacagtcatatgtggatataaggcatagttctggaaaacatagccgatctgacgatccttaggtgctacgttaacaactgacttgccatcaaaaaggatgtcaccgctagttggattaagcaaaccagctagcatatttaagatggttgttttaccacaaccagatgggccaagcaaacatacaaggtcacctttttttacggaaaagctaacatccttgattgcttcatgaccgttatcataaacctttttaaggttctttacttccacgaatttctcatcattcataagtttcacgcaccactatatattgatttaaatttttaaatttttctattaattctaagctaaatatacgaaaataacaaataattttcatttgaaattcggggtttcaacgactttgtgaaatgcttctcagcaagtattcggcttttgttcgcatttgcttttatttttcacttatttctttttaaaaattcgggtttactaaatattgtggtaggtaccaaaaaagccatgaattagtcatggctttttgtatcataagttatctccacgttcaaattgatattttgaactattcaaggcttgacgaaccaacttgctcatcaagttcttagtctttttggtaatcacaccagcagtttcatcattagcgctagttaaatatttaataagctctctgccttccatatttttagctttttcatcaataagatcaattcggccaataccgtagctttgacaatcatcacgataggcgtttacctcataaatatattggtgatagcgtggttcaacaagcacttgtaaagttttatacaaccagtaagcactactatctgaattaaccatatgatctgccaccttatagttaagtggtgtatcctcaatattggtgtagaaaggaacatatggtgaatatgcataaaagcccatattaatccattgaattgcagccatcttggcaggaacatcatttctaatttgcaagatgcttgattcttggtttctgtctaaagcaatagaacggaacatcttttgttctttttctgaaccagatgaaaaagtgtccattggatcgtatggtgtaccgttatagtgactagttaaaaatctttgcacatcttcaacaccaatcttcttttcgggaacgcgcgtaaatggcatttcttgactagttgggtcttgttcaatgcttggattaaacaacttctgtccataccaagttcttggagtattgtaaaaagcatcagcttcatccttagtaccaaaaatatctctgaaagaaaagctaccgtcagtactattgtttaaatgattcttttctacgaattctcgaataccagctgaatacataaagttatctggatcatcaaagtcaacattttgaatcaccatgatgttaggacaaattgcgtaagaatcatcaggaacacgagccgcaacccattggtgacccgcgccagtttccagataccaaacttccttgttgtctgaaaaggcaataccgttgctttcaccggtaccatatttttcgattaattgccctaagcgcttaacaccttcacgagcagtcttcacgaatggcaaagtaatataaaccattgagtcttcgttgattccatttgctactaaaggatcatgtcctaagcagcgagcattagtagcttcagtttcagtggctgacatagcaacgttatattcgttaatgccttgctcgtcccagcgaccttctgaatcatcagcagtagggacagcagtccatttgcagccatcgccctcaaggtgcatcttaaagccgttatattttgatacataatcttcatcataatgacgggctgggtttaccacaaaaactttttcgttaatgccaccataaccgtcttcgtcacgcgcaatcatggttgatccatcgattgaagcgtccttaccaactagcattgcagtacagttatcttttttcattattgtttgtacttccttttttatttcagtaataatttttcatattattaattctactactcattaacctgcatttgccgatcaacttttgctcgaccgttattatagttaaaaacataaccgggctgcacgttatagagatagacattgaagtttaaactgccatcagttgaaacggcctgcaaattcacgccgcgggccattaactcattaccacgaaaaacagcagttgcttgataaattacacgcttattctgccgcagtgctctcctaaccttagcctcaaaaatagtctgaatcttttggttagaataagcagattgcgtaaacaaattcttaggattattttggtcccctgattgattgcgtggatcataattgccgctttgatcaattccagctgagactgaataggcaatcaagtggccccgattatagatttgggtaccgttacggtgattatagtgccagccagtcggttcaacatattgccttactcgcaagctatcattagccacattgcgcttttccaaaaaggctgtattagagcgcgatgttcgattcaatgaatcaaggttagagtaaatcacccgatttatcttccatgcgcctttgaccaaagtcgacttatcatggttgacttcggtataagcgcgactgccactcttaaaattcaaattagctaatttttgataatcagttggcgatagacctccataattggtcttggcttttgatgcatcgctaattgtattagttacatgttcatcattattgccagtaaagtcacgcaaaaactggctaccatttggatcgctgccagctttagtaaaaactccccataaaatcgcgattaagacaattaatgatgaaacaaccgttccttgtttttttcgtcttcttcgtgtcatctttttcctctaactacgagcccaatcatcaagcatgcttaagaaaaaggtctccgaaaaacgcttaatcttagcaccatttttgatcaaatcacgtgctgcattcaaatcctgattatcttttctaaagaaatcttgatcacccatgattaagtaattagtcgttgctaacactgaattgtcaacttggccgcccatattgttgatcatcttgcccgcttcagcttcgttcatatgaatattgccagacaaaacgatattcttattttgaaccggattgtgccaacctaagtcaacataatccaattcgccaatagttaggtcgatattcttaatcttgctttgtgccttttccaataaatcatcagtaaagtgctgggcaaagtcatcataaaccttgatcgtatcaagagaatcctgcaaaccgtggtgagcctcaacttgagcaattccagcccgctgcatgcagtcaagcagacggttatggcgctcgcgtggataatatgtccgcgccaaacgcaatacgtcaacgtaatcattatcaagcactggtaagccatatttttgacttaaatcatacaaaaagttcaagtcaaaattgacgttatacccaatgataacgtcatcaccaataaactcacgaaattcacgaatagcctgctcagccggaataccttccttcccaatttgctcttcagtaattccatttagcttagtaataaaagcaggaacagaattattcttggaaaacttcaccaaattagtatattgatcaacaatttgaccgttacgtaccttaaccccacctaattcagtaattcgatcgcggtaaggatataagcccgttgtttcaatatcaagcattgtataattggtcaaaaagtcaggcttttcctgtccttttttacgcaacttgtcttgcgcaccggtcacatgtaaaattccattttttatgtaaatactcattcttcacctatttaattatttaatcaaattcatcagcatctcgtgcgaattgctatcaaaacccattgctcgtttcttaagatcagctggcaaatctgcatcagctaaatcagcggcaatataatgccaattaggaaattgctgcactagctttaccattggatcaagtaattgaggactggtctcatctacgcctaattccaaaattacgacattcttgtcctcggctcccgttagaaaccaacgaaaacgcgtattagcatcggtatcagggaagaagttagcattcagcggcatatgcaattccattggactattgcagtcctcgcactttggtactaaatctgccgttacgttgccgttcttaattgccgtcataaagcgttctactacttcatggttatccttttgaccatgattaatcccgctagaacactgcattttagtccaatcaccaaaggcattgaaaattcgattttcattaaagcctgcattttcaaaaaagtgcccgaatgtactggtcgcaataaaatattttttatcacgaattagcttttttagagcaagcatcgtctcactaggctcatattgtaaggaatattcgttgattagctcactccaaaaagcccattgctcgctccaagtatcaaatctcttatctaatgcatccccaattgtatgcacatcatacttatctgcaattttgccaaattgatcatcaaagccttcttcacttaggatatctagtccctcttctttggccatgccattaccagccgttacgatcaccgtgttagcatttttcagccatttttttgctgtcactaaatctgccattttatctctttccctttgaataacctgtcaagcgtaattgtccattaatgtattctcctaagaaaacatcactgatactattataacctgcctcttcaacttgttgctgtaaccaagcttcgcttttgtgaatcaactctaagacatcaatattagcctgaccatcactaattattgggaaacgaatgttagcttcatcattttcaataatagttaattgcccgttttgctcaaagatacaattcttaatcttttcaacagagtagatacctcgactgcgcaatttaaacattaattcattagcggagattcctgctttcatacagttgccaactaacaccttgccatttttaattacttgaacaggtttaccatcgataatccctctaatccaattattgtgatcacggctgaatttcaaaataaaaacaaccaacgtccaaacaattagaactaggaaaaactgaagaattgtaatactaggattgtaaatcaagccaccaataattccacctaaaacataattctgcaactgatctaatgcagtcgtaggagccagattagacttaccaaagacattgatttgaatgattaaagttaagataccgagagcaaacttaatgaataattgtgtgtaatctagctgcattattttattacctctactttatgatcaattacatgggcttgcgttaatgtgtaagtattgcgatcatcattaaggtttaactgataatcaatatttttagaatcaatccttacgatcatgccattagttaaaaccgttgaactaactaaaacatcagaagtcgaaacattttcatctttagcaatcgatttgatgaatggcacgatttgaatcgcctgtgatttttgcgtattaagttgcacatatttttcatattgcgtaccggcaaacaaaagcaaaaataataaggcaataatacccaaatcgcgatacttggttgcaaaacggttatgtaaatatagcaaagcaaaaattatcattgctaacgccgagactgtcaagaagtttgtgtaaataatctctctcgttgattgacttttttatttatcttttaatcaaaataggattctagggtgtctcgaacttgcccaaatcctttatgaatcctgttaaagtaacggtcattgtaatccattgcctgaactccaataaaggtgtcaagcgactgctcagttggaaattctgttttaggcttggttttccgcttaagcctgttgttaaaggattcaatcatgttagttgagtaaattgaagctctaatagctggcggatagttgtaaaaggttaacagatcaggctcaacctgtctaagatctctaactacgtttttgtaggctttttcccagttttgatagaattcatgcagcacctgtacagccatttctttgtttgactgagtatgaatctgcttgaattcatccagtgctttttttcgatcgtcaacccgcattttggcactgatattacgcatgacgtgtaccaagcagcgttgaaaatgcgctttaggataggactggcagatagcctctttcatgccaactactccgtcagacaagaagagctctacctgttcaaggccgcgactcttgaagcctttgagcatttcgctccaaatctcaatattttcagtaggcgcaatacagtagtcaatcacttctttatgaccattaggtttgataccgatggcgatataaactgcttcgcgctcataagtgacccgcttaagaggaatataggtggcatcgagataaacgcagaagaacttatctgacagatgtcgctgatgatatgcctcaactttgggaatcatttctttagaaatattggaaaccatagctggagaataatagccgccatacattttctcaatcaaatcagcgatttctcgggttgtgacgcccttggaatagagcttgataacagtttgctctaaaacatcagtatgccttttataatctggcatagtgtgttgatgaaactcaacgtttctgtctctaggaactttgatttctatttgtccgaattgcgtatcaaccttgcggtaataagcaccatttctagagttgccagtattccagccatttctggcatagggatcatagcccagaaaggcagtcaattcagcttctagcaagttattaacagcctgttgtagttctttgcgcaataaatcatttattttgtctggattgaatagagcttgagcaaaatctttggtaaaatcattcatgaaggagttcttctttctgtatgtgtttttttgttcaaaccaatcatacgagaaaggaactcctttttctaatgtttaaagaaataaatttaaggaatcattcatccttacacaaactattttacagtctcctaacgccgccaccaacatcaaagcatataatactgcctgattagtattctggttattttgaatatatttcattgtataaaaggtcatgctctacctcacccttcatatttttctttcattctaacacagaaaaaaagtagcactttcgtactacttttactagaaattattcacttttcactattattaattatttttgaatttcttttaatccagctttgcgacggcccatgttaaaccatggtgaaacagtgaaggctaacacatcattaattacatagatcaatgaattaattgccatggctaagtttgcatcaccttgagcataagttacgcccaaaagaatcaactggaagacgccactagcagtccaccaaaagtattgattgttgtaacgcataaagcacatgatcccagcagttaatgaaatagcaaaactaatagcatcaatccaaggacgaggatcattggtaaatttaccaatcaaaaagccggatacaacataaacaagtaaagtaccaacaatagcaacaagccattcctttgaaccgaattttcttaagtgattcttagtgtcatcattccatgatctaacagcaataataactggtaaatctaaagttgcaatataagcaatctgttcaaaaatggaaagataattcttagctgaccaacctgcatagataaaacaagcagctgaaatcaaccccaaccaaccattaattgctttagtagcgttaattgccaatacacaaagtgtacccaaaagcgtaccaataaaagtaatcaaagttacgcttgtaattttgccttgaatcagcaaagctaattgaaatccaaacgcaaaaaaccataaacagtaattttgaactggccagcctttcaattgattaaatagccaaacaaaataattttcgtgttttctttccattgtactgagacgtaaaaagtagacaattaaaatattggattaatagaggcttgacttcgatactctttcggggttaagccttttaatctgctctttatcctttcgttgttatagtattcgatatattcctcgattgcttgagttaattcttgaagattatgatacttgtattcttgatcatagaacatttcagttttgagcaggccaaagaagttctccattagcccatcatccatggagttgccctttctggacatgctttgagtaataccatggagttttaaagctcgctgataacgagggctttgatactgacagccctgatcagtatgaaaaatgcagttattaagagctgtttctttggcaaaagccttgtcaagcattgtcattactaaatccatatctggatgtttggagatagtataagaaactatatcgccaccgcagccgtctagaataggcaataagtaaagcttttcattattaagatgaaattcagtgatatcagtataccattttgtgttaggcagggctgcgaagaaatcacgatgaattaaatttggagctattttgccaatagtacctttatagcttgaatatttgcgcttattgcgcctgatgcctttaagacctaatttatgcatccaatagcgaacggttttctccgtaactttccagccctctttgattaactgcaaagctactctgcgatatccatagcggccttgatgatgattaaaaatctcatggattctagcaataagctttgaccgtttaggcttgacgggctgtcgtttgataatcttgtagtatgatcttctggcaattataggtagctcagggtgctctgcaatcgcagctaatacataatttaaactaactttgaattcttgccttagatccgtaatcaccctagctatttcttctgatcttcttgatccaaggcacttagtttttttacgtattcgttcacaatacgcaatcgcaagttttcttctttcagctgctggatctctttctccagttccttgcgagatttctgcttttctttggtcacgggcagggcgtcctttctgtttgataatgacattatacccgtttttcttatattctctaatccaattgttaagcatgccaatacttttaaaccccagttccaaagacagctgtaagtatggtttattgccaaagattgcttgttcaatagttcgctgcttaaactctttggaatagctttggtttttagtagttaaaatttctattccatgcatatcaattaatctaagcatatagtctaaattagctagattcattctgtacgctttagccaattgactgattgagatattttcatctttccatttatgataaatttctattttttgttctttattaaatttagacatagtaaacattctaagctaaatagtgaattagttatccgacgggataattgattcactatttttattcttttgtagaattaaagtagtggtaaaacgatatgccctgaggtctttagacacttgatgtcgcataataaactggcagttttacttaagttttcaatagtctcttcgaagaatgtggacactagatgtcgagtttagaaaattagatctgatttcttaagtaaatacgttttactactaagttttggaggtttttattatgcaagttacttttggaattgatgtaagcaagtctacttctactgtttgtgaactaattggtgaaagcaaaaatgaactaaccattactaataatcgtcctggttttattcaattgcttcatgaattaaccgctttttctaaacatccgcaaattatttttgaagctaccggtgtttattcacgcagactgcaggcttttcttgaagactacggctatgaatatgttgttattaatccgcttaaagccaaaaaagagatgaatatggggctacgctacaacaagaccgataaaactgatgcttatcatttagctttaattcaaagactttatcgccatccggttaatcaaagcgaatcccaaacttataagcagcttaatgctttgagccgcttctatgaccagctgacaagtgacttggtaatagctaaaaatcgacttcaccaagctctacaatcgacttttcctgaaattgaaaatttattttcttctgctaaaggtaaaaattactggcaaatagttgtgcgatatcctcattgtgacttagtaagaagagaagataaaaaacagcttattaactggttaatgagcttaaaggggattgcttttaaacacgctctaaggactgcagataaattaattgaattagcttatcaagcttatccagttgtatcttgctctagcatagaagtcgagcaagtgcagtattatgcacacagattgcttaatttaagtgatcaaagagaaaatttaatcgcaagaatggttaagttagcgaagtctttgcctaatcatgatttagaaaacctagaaagcattccaggctttgcacagaccactgctgtcagagttttagcagagttaggagatttacgcagatttagtaatcctaataaaatcaatgcttttatcggaattgatccaggcagatatcagtcaggagaaatggactctaatttaagtattactaaacatggcaatgcagtcgcacgtaagttgctttatcgagctattggacaaattgataatgcagctaagacaaatccgtgtcatatagcagattattatgaaagcaaaaagctatcctctcaaaccaaagggttcaaaaagatagctattgcttcaattcataaactaatcagaaccatttatgccctgattatcaatgatcaaccatatgattacaacgtagccacacataatcaaaaagactttagtcgtaattaattgatcaagtacattataacgctaagcccaaaaatcagatatggatctgggcttatttgtcgtgtctaactaaaaaaataaatcgacactaaaagatgtttaagttgaaatttaaacaaaaaatgaagccaaacttcttattatgcttgactttacgtagaaaaagacctaaaagtgtctaacttttaggtctcagttcacatcctattcaacattccccttttttattttaggttgcaaaatacaagatcttgtgccttatccgtgctatgtaaaaaaacatcgatatctagtatagtggaccattaattaaatacaagaattgacatttttaatttttgcgttaataacatatttctatttccgtttatcaagcaaacatttattaattttttctaaacagcaaaaaaattttgttccttttagtgacacagtgtcatatgatatatacgtgattattaatttatatttttatggaggtacactcatgtttaaaactaagaaaacgcaatttgctatccgaaaattagcacaaggcgcctcagcagttttactttgcttcggcatattgggcggagcaagtgcacctatcgttccagctgcaactacagatgacccaacaaaaacagtcactgaaagtacaattaatagtgagaatacttctttcaatattgaaaccaccaccaatgcatctgataaattcgcttccatcagcaaaaatgggggggtacaacggtagtgccaaattctgctgagccagtttctccggatcagtccattacagaaaatgataatcagcaagaaaaaactactgtagagaattctactgagatatctgagcctgtcaaagacatcaataagtttgataatgatgccaatgttgataaagacgaaacaatcactgtaaaaaagccaacaattaatgtcgacactgaaaaggtagaacaaggcgatgaaacagagaaaagtaaactcgaagaaattaaaaagtatattgaggacgtagccgcaaaacatccattaggcattgccggaattttccacctttttggtaacgaaatagatggatctgctcatattgcaggaaatgtcgcaacagacaaattaagtgctggcaacttcggtactatccaagatgccactagtaacttgactacttgtgatattcattacatcggcagtattgatcatttgaatcagattgatggcgaaaataaactagttatttttggtccagatgttgaatataaatcatacgaaaatggtagttccattcaggtaaaaataaatggaaattggcaaaaagtaggaattccatacaacaaaactatcagagctgaccaaattctagatattcaaggcgaactagataaattaagcgataaatcagacgaatgggctaagcaaacgcaaaccgaaggcgtaattgctgatttcaaggagggtaaatagttggatcgacgtttctaatgctatcaaggatggcagcaaagatcctatttatgtaactattgatgcaaaatacctttcaggcaataacaagcatgaaattgctattaaaggcatccctgcagacgcagaaacaccaatcatcatcctaaatgtaactaatgttcaaaatggcgatttaaccgttagcacaagacttgttttggattattcagaccaaactagcatcaatggcgtaagtgaaaaaccatctcaacttaataagttattatggaattttggaacagatgttaaaaatttaactattgaaggagacttccatttaggtagtattttagctactaacgcacatattaccgctaacaaaaatgttgacggtaatatcattggtaacaaaatcactattaaaggtgaaactcaccgttgggacctaactccgccattagtagaagttgaaactccgccggaggatccaaaagatccacctaaagaccccgaaaagccagagaatccacctaaggatcctgaacctactcctgagcctgaaccggaactaaagcctgagcctactcctgatcctgaagaagagagtactcccccattaccagaagaagtaattcctccaactgataatgaaaattcctctgacttcaaggaagaggacactgctcctctaccagaatctgttgtagaaaaacaagttaaaaagaatcatccatccccttcaactactgaagaaaatattgcacctcatgctgcgactatcccaacctcaactataactgaaaaagaaacagttttacctcaaaccggtgaaagccaagacaagctaatgacgattggactcatcactactagcgttgcttcattgtttgcagtattaggcacagtaatcaaaaaaagaaattaattaaaaatgattcaattcaagccatttttattcttaaaataatctagaattaagtgaggattaaaccatgttaaaaaatagactaaaaatattccaacaaattcttcctactaaggcaactaacactccaaaataccaattgcctatcaactattacgatcctgaaggcagcatggttggcacttattctggaattaacttggcggcaaatgaaactatcactcaccaccagctcaaaagatttatcaacatccatcttcccgaaaactacgaagtttttccttactttgcttatcctaaggagaatatcacctgtgaaaatctgcctgatgaaataatgatcacaatcagattatctaattaaaaaaggcgactcgattgagtcgcttttttcattgcaattgatattaatgttgcgaagcaccagttgtagtatctggttcttcgtgcttttcttctttaacttctgcagccttagttgaagcaccagttgcggcgtctggatcagaatttctacggtaagttgcaccagtagttgcatcatcatctactaccaatttttgaccagtagtctcacagaagtacttaactaatggatataagtctttgacccattcataaataccagcatagttaccttggtcgtcttctacacgcttataatagtccacaaccaacttcttcaaattgcctgttggtattggcatataaacatcatcatgacctgcttccttagtccgcaaagcatgaacaacttttttaacattcggaataacgtcacgaacatctgggtgaactgcgcgcatcgtatcacccacttgatctggcgtagctagcattttcttgttaggatcagttggacggttataccacaagaattggttattatcatcaacaaatgtcattttaccaatggtatttctcagcatccaattaagttggttaacagttaacagacctgcatcaagtttgacataatcgtcaccctccgcagcatgaacttttttagctgctttatctagccaatcaggatcatttttatcgattccctcaactgtatacttagacttaccctttgcatcgaaatcttcttttaagtattcatcggcattcatatctttaagccattttggttcagccatagtaagaccccctcgtatgaactttgttaatctaattatataatgtaagtggtttcaattcaacaattttaatatatttatacgcgtggtgctagttaaatcgttttagttaataaaaaagtccaatcggattagactcaagttgtaagtaaattaaatagaaaagagtctgatctaattgaactacctcaagcttaatcgtttctctcaccatttacaagttagttttagtcgtttaaatgtaatttgtcgttcactatataatctttatgcgcctgataagcttacgcatcgaaaaaacattgatcaaacaaagctttccgacagctccatcttagcgatgctcatttggcaaactgaaattggaattgaatcccaaagaagattctgtaaattttttgttggcttatctcattctcgctttaatcgtcgagccaagatgcttttgcctttaattcgctgcatccgtcaagcttggaatcaagaggtaaaggttgctggagaatttttaattattgacagttttcctgttccagtttgtcagcctgttcgtaattatcgtgttaagatcttccgtgacatagccgatattggctataaagcaaccaagaaagtctattattatggtttcaaggtgcacgcgctagtaagcgatgatggctatttgcttgactacgcagtcactaaagcatcagtgcatgatgccaaagaaacgacagaattgatgattaatgctcatccaattaaccattatcttttaggcgatgaaggctacttaggaaaagacttagctgccgagttaaaaggtatgggctatgtcctttggacaccatatcgaaaaaacatgaaaggtgctaaaaaacataataatcatcaactgatggcaattagaagaacaattgaaagcgacttttctttgctcagttactataacgctgaaaataaccgagcaaggagcttagctggctttcagcagcggctagaaatagccattttagcttataatatggcatattgcctagaacgatttaactagcaccacgcgtatatttatataatatttttactagctggattatatattattttacgcgtggtgctagttaaatctttctagacaataagccaaattataagctaaaattgcaatttccaaccggctttgaaagcctatcagactacgtgctcgattgttctcggcattgtaataggtcagaagcgaaaagtcgctttcaattgttctgcgaatagccatcaattgatgatcattgtgctttttagctcctgtcatatttttacgatatggtgtccaaagttcataacccatttgttttagctgttgatgcagttctttgcctaaatagccttcgtcgccaagaagatagtaattagatggatgggtattttccagcagttcaactgtctccctggcatcatgaactgatgcttttgttacgacataatcaagaatgtaaccgtcatcgctaacaatgacatgaactttgaaaccatagaagtaaattttcttggtggccttataaccaatgttggcataaccgcgaaaaattttagcacgatagttgcgaattggttggcaaacaggtaccggaaagctgtcaatgatcaagaaatgtccattcaggtcaacctttttattcatttcttgccgtatctgataaatcaattgcaatagctgacgtgaacgccgattaaaacgtgagtgtgataaacaattgaaacattcacagaatcttctttgtgattcaattcctgtcttagcttgccagataagtaaagccaaaatcagactgtccgtagttttaatttgatcaatatttcgccgatgagtaaactcagccggtgcatacaaacgataccagtgccgacaaattatcactaaatctttaaaactaacttgtaaatggtggctaaaacgcttaagcttaaggcagttcaatcagatcagactcttttctattattactatttacaagtcgagtctaacaagattggacttttttattaactaaaacgatttaactagcaccctgcgtattattttatataaaaaaagctgatcaacgagcaactctttacatctttgtctcaattgtatgagtgtccaaatgaatgatcacgtcaaacatcgctttttcttctggtgaaatcttatgagccacctcaataacagcaatacgtggattcttcaacagcgtcttatgaatgcctaacgacaagttcgggtcaagcgcacttgtcgcttcatcagccagcaaaatcggccgatctgataaaagcgcgcgagcaatttctactctttgaatttgtccacccgacaagccactgccgttttcacctacagccttgtctagaccctgttcctttaccaattcatctagaccagcctcatgaataacttctttcaaatgctcgtcactcactttacgtcctaacgtaatgttgaaacgcaacgtatcatcaaacatgaatggcttttggttaacataggaaaaataattatgggcagcatcccaatttcccgttacatccgtaccattgatcaaaattttaccgtctttgggctttctcaaacctaatagcaagcgaagcaaggtggtcttgccccaaccacttggcgccatcaatagaactttttcacccggcttaactgttaagttcacattctcaaagatgcgtttgtgatcactacctgtaacataagataattgttcaacctccataccatcaaaatgatcgatcttctgcttatcatctttcagcacgtgatgcaaagcgcgctgggtcttttcccacattggcacagtcgacttgacttggttaaattcgttaaaaagagtcacgattggcgtgataaagttcaaggccaaatcgaccatcattactaatgtacccacctttaaatttccctgcagcatcataataccgccaatagtacatggtacgatgaagcaaaacaattcagcagctgaataaattaattctagtgcccaagcttgagtcaacgtcatattacgcagagcgttctccattgcctgggccgcaccagctgctcgtgtaacgatgttggtgcgcacgttataaagcttggtagcctgtgccccatttaatgaatcggacacattttgcgtatagttagcgttagtcgttgcccaaatcttggacttacgtgtaatgataggactagtaatcatttgaactaatgctggcgcaagcgtagcaatcaaaaatactagggtcatctgccatgaactataaaaagcaaaagtaattgccccgaaaaacgacaaaccttggaaaatcatatccaattgtgccgttatccgattagtttcaatctgttttaaatcgttggtcatcagtgataaaccgctcttgatatcaggctcaccttgatcaaccaaataacgcaagttagtgcgcttaaaggtcatattcacgtcacgaataatgcccatctttaccgtttcatagacaaagttactggccataaaacacatctgacctaaggcagtcaaagcagccaggcgaatcaaatgcagataatcatgcgatcctgacgaagcaacattcaacataatttgtaccatataagctacaaagacgatgttgcaggccttgattgcggccaaaatggtatagctaataatttggctttttttagcgtacttcaggctcattaatttctccttttctatcccgttagaaacattatacccgctagcttgtctttttctcaattagatacgataattagagtaatcattttaatttttaatgaaaagcagaaaggaacttttaatgaagactggtactaaaattattactttagacaacggttatcacttatggaccaacacccaaggtgaaggcgacattcatcttctagctttgcatggtggtcctggcggcaatcacgaatattgggaagacactgcagaacaattgaaaaagcaaggcttgaacgtgcaagttactatgtacgatcaactcggttcactttattcagatcagcctgactactctgatcctgaaattgccaagaaatatttaacctacgaatatttcttagatgaggttgacgaagtccgtgaaaagttaggacttgataacatttatttaatcggccaaagctggggtggcctattagttcaagaatacgccgttaaatatggtcaacacttgaaaggtgcaattatctcctcaatggttgatgaaatcgatgagtacgttgcttcagttaacagaagacgccaagaggttttaccacaaaccgaaatcgacttcatgcacgaatgcgaaaagaacaacgactatgataatcaacgctatcaagatgacgtacaaattttaaacattaatttcgttgaccgaaagcaaccatctaagctttaccacttaaaagacattggtggaaccgctgtttacaatgctttccaaggcgacaatgaattcgtaattactggtaaattaaaagactggcatttcagagatcaattacacaagatcaaggtgccaaccctattaacctttggtgaaaacgaaactatgccaatttcaactgctaagattatgcaaaagaagatccctaactcacgcttagtaactacacctgacggtggtcaccaccacatggttgacaaccctgacgtatattataagcacttagctgactttattcgtgaagtagaaaatggtacatttaagggcgaaaattaattaacagatattcaggctggaatcgatttccggccttttatttttaaggaaaatgatatggatgaaaaagatgtcaaaattctgctagttgaggatgaagaaagcgtcgctagcttcgtcaaaactgaattagaatttgaggattaccaagttgtttgggctgaagacggcaaaaaagcattagacctttttactcaagaaaagccaactttaattttgcttgattggatgttgccagtatatgatggcatgaccgtgttacggcgaatccgcaagcaaagtgatgtccctattattatgcttaccgccaaaaattctgcctctgatataagctctgctcttgatcagggactagacgactacctcaccaaaccatttgaaatcgaggaattgctggcacgaattcgggtagtcttgcgaagactggaaaaaatgcggcagcaaaatgacgtccctgatacttccctagaatttggcccattaaaaattgatctgcttaagcacgaattttactgtgacaccgagcaaatttatcttactcctaaggaatttgccttaatcactgaactaatgcgggaccccgaaaaagtcaaaagtcgtgacgagttgcttgatacagtctggggatatgactttgttggtcaaaccaatactgttgatgtttatattcgaactattcgcaacaagataggcaatccctacaaaaagatcattaaaaccatgcgcggcttgggctattgtttgagaaaattagatgataatcatgaaaaaagctgatcctcaaacaactacgcaacaattaacccgtttattcgttaggctatttgtcgctattttaattctggtcaatttggcttttctaattatttcatcggcctatatttattaccaagctgaacggcaaagtgaacaagttgttgaagcagtaaaagaaaatcttgattcaaaatatgactggtcggctatgctggatgcttatttggcaaaacaagacgatgatgccatcattttaaccacccctcaaggcaaaagttattactctgaaaatgctcacgagacctttaaacaaattaatcgccaaaatcattatcaaaacatggtctattccaataagcatatttacttcttacggacggaaaactcgcatgactttaaaatcaaggttgcattaaacattgatcgcttatttcatttaattatttggctatttgggacaatgattgtcatcaacttaatcgctattctgctgagcatcccccttattcgccgttttgcccacaaatggagtcgtccaattcaggtaatgaataatgaaattcaagaaatccagcaaggtgcttcaactgagcaaatcacagtgccgcaacaaccattagagattcgaaaattagcccagtcttttaacaatctgctagcttttcaaaaacaggccttacagcgtgagcaacaattcgtcagtgatgcttcacatgaactcaaaacaccaatcgccgcaattcgaggacacgttaatttaatcagacgccatggtcaagccaaaccagaaatcatccctaagtcactggattatatcgatactgaatcaaaaaagatggaaatattagtcaacgatttactcaccttaggaagaatcgaacgcaatactgaagtcgtcaaaattgatttggtaagaattattaatgaagtagtgtcagaaatacagtcagtttatccacaaaaaatacagactgacatgccacaagtattgaaatatcgtattaattcactagattttcacaacattgtgcacaacttagtggaaaatgcggcaaaatattctcctcaagacagcactattgtagttaaattagctaaaaataaaggacaggtctctttcacagttgcagacaacggaatgggcattgcgccagaaaatcgcgagaagatctttcaacgttttttccgtgaagacacgtcccactccaataaagttaaaggatctggcctagggttagcaattgtcaaagctgaagctgataagtatcatggtcaaattaaagttacggataatagtcctcagggaacaatttttacagtttcttttcctacagaaaaatgaagaaatcttcatttaaactctattaaatcttagttttttaaagctgcttagctagtaagataaatatatcaagttaaagcaaaacaaaaaattatcaatagtttaaaggagaacatattatgaagactattaacttaaagaaaattactattactggcgtagcattactcggcttaggaactgctgcaattaccgcaactaatttagctactgaacctaacgtagttcaagctgcttcaagcaaaattaaggtttcacaaaattcagctgttaaaaagtttaaggcaaaattcaaggcagctaaagtcgaatcaatcagcttagataaagaaaaaggccgttacgtttacgagatcgaaggcttcaattcaacgagagaatacgaaatgaaaattaatgccgcaactggcaaagttatctcatcccactccgaaagacttgatcgagacgagcgtaataaaaaagcattaaatctcagcaaaactatttctcgctcaactgctactaaaattgctcaaaaaagagtatctggcaaggcagttgaatggtcattagatcgtgaaggttcaaagaatgtttgggaagttaccatcagcaagaacggccaaaagagcgaagtaaaaattaacgcaattactaaaaaagtaatcagtgttgaacgggactaattgagaaaagaaggtatagaatagatgaaatttactaaactgacaagtattgcattattaagcgcagctttattaacaggaactgtagcatgttcaaaacaagataattcaactgctaaaactactacccaaaagagtgttacttcatcaaaggttacacataattctgaatcagcaatgagcaaacaaactcaaaaagataatattcaaatcaaattaagccagcaagaagccattgataaattccatcaacaatttagtggcaaacagcttaaaagcattgaattaaatcgtgaaggcaaacattacctttatgaaattgaaggattcgattcaaacaatgaatattctgttaacatcaacgcagaaactggtcaaattggacatgttcattcagaaaagttagatcatgatgatcgaaaccaaaaagctctagatttcaagggcaccattagccgcgacgatgctagtcgtatcgcagaagagcacattaaaggcactagcgaagaatggaaactagagcaagacgaagacactggtaaaacatactgggaagttaaggttaaaaatggtcatcaagaaaccgaagttaaaattaacgctcacaccaaagaagttatttcaactgaacatgatgattaataagattaagaacataaagaaagccgcaacattattctcgaagttgcggctttttattttgtctaatttttggataacttttttaccaataaccaatcagtttgaggatcgctaccaacttggaaagtatgctggctcactttttcaaatccatgacgcttataaaaatattgtgccggaatgttcttttcataaacgcctaaccacatgtaatctttgccttcttctcgtgctgtcttttctgcaaaatcaaacaaaacattgcccaacccgcgatgttgaaaattagtacgcagataaattcgttccacttctagagcattatcacgtaactgctcagtctgagcatccccaacattgatttttaaataaccagcaatttttcctttaaccattaaaaagtaaaaacgactattaggattttcaatctctctaatcaacttttccgtctgataatcttcctctaaaaagcgtttcatgtcatctggtgcagtataaggatcaaaagtcgttttaaaagtttcacgtgaaactttctgtaattctttcacatccgctgttgtaattgctttaatctcgtacttcatcaatatttcctctttccaccgttcttaaccaggtgccaattttcactggcattcttttctacaatttgtaacaaagcagctaattctgttctctgtttttgatctagtcctgtcaaaactatttcatttgaataagcattttctttttctattcgagcagctaatttatctcctaattctgtcacaaacaaatgcttaatctttttattctgctggtcattttctttcctaatcagctgattttgttccagttttttaatgctacgagctgccgtcgtccgatcaacattaagcatccctgctagatggtcagaaataattcccggattttctttaatgcgggctaaatacaggtactgacctcgattcaattgcatctctttaaattcaatattagcaatcgaatcaagtgctcgcgcaatagtgccaatttgacgcaaaatatcttctttcatgtttttcacctaaaaactattatatttaattttgttgtaattgcaacaataaaatataaaaactaaaaaagggatcgctccctttagttaattcatcaatttttctttagttcatttagatcgactacctgatcagctaactgcttaacttcatctcttaagtggtgagttaccataattacggttttatctttttgcgtcaaaatcaatctttctaattgtacgctagaagctttgtctaaggcagaagtagcttcatctaacagataaattggtgtatcacgcagcaatgcacgtgcaaaagcaacacgctgtttttgcccaccggacaactgtttaccttggtcagctaaaacagtatccatgccatcaggcaacttagcaattagatcctctaatccacattctttgatcacttcagaaatttttgcttttgaaacttggcgtcccaaagttaaattccaccctagagaagcagtaaaaatatatggatcttgctgcaaatatgtaatctgatcatgcaaatccttatctgaaatctggttatattccacatcagaaatttcaattttcccctgataatctctaagtaagccagaaatcaaattcagcagagtcccccatcagaatatatttatttttcagtttaaaatttaaattcaaattctcaaagataggcttatcttgtccagaatactgataagaaactttatccaattctagattgcttagtttaaaatcagcaggcaaagctccatcaacagttttaagcggtatagtcttaaatttttctataattggtttaactgatttgaattcttgccaattaaaactaatcccacttaattcagcgaaaattgtactggcaaaaaattgtgccccactgatggtcccgactggcgttaattgatgcaaaatcaaccagcctgtttgccctaaaatgataacttgactgataaaggctagaccattggtaatcgcctgagttatcccggctgttttactataatttagcgcatgttttttaacatcatcagaagcgccattgatctttttgacgattgtttgcggtaaattggcaagaaataaggtattgaagccattcaacacatcattaattgaattaaccaaacgttcattggcatgggtatattctaatgaccttttggccaaaattttagaaaacaaattgggaaccactcccataataattgtcaaaataatcacagtgaccacaagactgacattgaagtacgccaaagtgagcataccgaaaacaatttcactgatttgtctaatgatcatcatgaaatcctcgacaccaaagttattaatggttgtaatgtcattggtcagccaagaattgtaagtagctaccgtttgttgatgaaagcctgaataactcgtctgtgatagatcttgcgcaatgtcatttctaattaatttatccacattttgtgccaaacgggtttgctcaacattgactagacagttaacaatcgcgtaaaaaatataggcaccgcccattaaggcaacccacatgaaaaaacgctcagcttttaattttgcaactgcacttaaagcattagcgctagatattccggctagtgtcaaaaagcctgcattaatgactattaaaaatgtaacaaataaaaattcccactttaatcttttaaaatattgcagtaattccattgattctccttatgagactgtaaaatagtttgtgtaaggatgaatgattccttaaatttatttctttaaacattagaaaaaggagttcctttctcgtatgattggtttgaacaaaaaaacacatacagaaagaagaactccttcatgaatgattttaccaaagattttgctcaagctctattcaatccagacaaaataaatgatttattgcgcaaagagctacaacaggctgttaataacttgttagaagctgaattgactgcctttctgggctatgatccctatgccagaaatggctggaatactggcaactctagaaatggtgcttatttccgcaaagttgatacgcaatttggcccaattgaagtgcaagtgcctcgggatcgcaacggtcaatttcatcagcacacgctgcctggctacaagcagcactcggatatcttggaaagcatgattatcaagctttactccaagggcgtgaccaccagggaaatagccgatctaattgaaaagatgtatggcagccattacagtccagctcaggtatcaaatatttccaagcagatgattccaaaggttgaggcttaccacaaacgcaagctaagcgacaagtttttctgcgtctatttggatgcgacataccttcctttgcgccgagaaacatttgagcgtgaagcagtctatattgccattggcatcaagcctaatgggcacaaggaggtcattgactactgcattgcgcctagcgagaacattgaagtctggacagatatgcttcaaaacatgaaatcccgaggcttaaagcaagttgagctttttctttctgatggtgttgttggcatgaaaacagccttggccaggacttatcctaaagctcattttcaacgctgtttggttcatgtcatgcgcaatatctgcgctaaagtacgcgtcgacgatcgtgaaaagatcatgaacgaattcaaacaggtgcatcaacagacaaacaaagaagaagccacagctgtcctgcatgacttctataccaaatggggcaaggtttacagccatgttatcagaagcttgaaagacatagaaccagatctgctggtcttttataactatcccaagcagatcagagcttcaatttattcgactaacatgattgaatcatttaacaatgtgatcaagcgcaaagctaagcctaaggcagagtttccaactgaacagtcgcttgatgcttttattggcattcaggcaatgagctacaatgaccgttatttcaatcgaattcataaaggctttggtcaggttcaggacaccttagaatcctactttgattaaataaataattaaaaaatcaatttacgagaaagatctatttacacaaaagatttgacagtttcctccttatattaaaaataattaaattaataatactatatttatgtatttgttcaatattttttaatactttacttaaattactgcaaaattaaaagggatcgctcccttttaattagtctacataagcatatttatatgaccattgcgtaccagcagtattatgaatgatgccgtgaactcgcttgttttgcaagtaagctgtggtctgttgataaatcggtgtaatagcctgattactatttacaatcttagctgccgaaatcagatcattccagcgtatgtcaggattattggcgtcttgattgccagcttttttaaccaaattatcgtactcagaatttgaccacttaccgtaattgtaagacgtacctgtcattggaatttgcataaatgtcatcgggtcgttgaagtcgccaccccaatgagagagataaatgtcaaagttgccttgatgtgctcgactggtggttgacttatcaggaatattggtaatatttatcttgattcccttcaattctttggtccattgtgactgcaaatattgggtcaattgatcactgtctgcttcatcatttgaagataaaacatcaaaagtcaaactcttttggccaatctcctgtaatcccttttgccaatatttcttggctagagctggattataatcaactgtatttttcactgcttgttctttagcaaaatctatacctgttttaggatttgcagccaaatcattggcaacaaagccttttggcagagttgagccattgcctaaaacctttttagtcacaatatcacgatcaattgataatgataaagccaagcgaatatttttattattcaaggcctttctattaactgcatttttatccttaaaattataaagcaagaaacgcactaacgaatatggatattgagtaaagtcattattgctcttcaagtttttaacttgctcacttgaaagtggagttaaatccaatttgccctgttgatacaactgataaccagtattgttagacttaactacttgatagtgaatcttgttcaacttgactaccttcttgtcccagtaatcattattcttaacaaatgaccaggtatcattagttccattccatcctttaatcttgaaaggacctgagtagacttggtactgagccttggttgcgtatctattgccatactttttcacaactttttcgttttgcggcccaaatagtggataagccatcaatactctaaagtaagcgatcgggcgatttaacttaaccactaccgtctttttatccggtgcagaaattcctaatgcattaggtgatttctttcctgcaatgattgcgtcagcattcttcacgccactaaaaagataggcatacggagaagcggtcttaggattcaagcttcttttccaagaataaacaaagtcctgcgctacaatcggatcaccattggaccacttagaatcacgtatcttaaacgtccaggtcttaccatctttagatacggtcccagttttagctaagccggctgttggcttaccatttttaccaagacgataaaaactttcgaatacattgccagtttgaccaaatccggtagacttactgatatcaatagtatctagtggagctgtggtgcttaaatttaaagtgccactttgagctgccgacttactactgctattgccattaccacatgctgcaagaagcattcctaatgaaatagtaacgactcctgctaaaactccctttagtttcgacataaattttcctttctcaaacaaaaaaatgggatgtactccaacacggaatacatcccattaagaaccacaactttttaactagttaatcagtaatagtcttaagatgaatcaccacatcagagcatgtcaaataaatgctgtttgtacaacaacattcagtgtattgacattgcatttgacgcttaaacatgtgattcatcatccttcttacttttgataagaataatcataatttattcgatcacgattgtcaacaaaaatctattgtataattatagaaaaatatttggagaaatttttatggaaattataaaatatggtccttacactcttttcacacttattagaacaatcctaacatttatcgtggctattgagcatatcggtatctgtttcttagaaatgtttggtaaacctgaacaacaagctaaggcttttgacatggatatcaattttgttaaacaagaagctgctcaagtttcactagctaaccaaggcatctacaatggtatgttaggtgtaattttgatcattgctttctttattttccctatccctattctttttaacgtatggaaattaattctaagtttaattgtcgtagtagcaatttacggcggattcactgcaactaagaaaatctttttagtacaaatgctacccgcacttttagcattaatttttcttttcatttaaaaatattgcatttttgtagcaaaaaacataagaaaattcaaagctcctagtgataagctatcaccttgtgattatgtaatatataatatcagtaaacatatagaacataataacgaggtggaattcatgagaaaattttttatcattatcagcagcattattactgggttacttattgggataattggggcaacgatctatctaaatagtcaatcgtcaaaggtaagtaactttaccattcgaactactaatttaacagctcaaccgaaaatgatcagctattctagcaataacctgccacagattaatctctcacaggattccgccgttcagaaattcaaatcattatatacacatgcagtaggtcaactaccttagactgaagtctagggtttagtggcttgttagcttgcgctaaccagaacaccaacttgcttagatacggatttgacttaccagcagtaatcttttgactattgccgatagaggtcgtctaattaccaaagccttttaagtccgcgagttgctagcggactgcagcttttctaggctgcttcttttattttaggattctgccacttgcctaatcctttttctaagatgttcacggccgcattccaatcacgaatatgatgcatctgacagattgggcaagtccattcccgatccttaagggttaatttcttataaccgttttggcccataatactgccacattgatggcatctttgggtggtgtacttaggatcaattgttagaaattctttgccatatagatatgccttataagccagcatgttcaggaaactacgccaaccaacatcagaaatagcttgagacaaggcatgattcttaagcaggtttttgctccttaattcctcggcaactactaaatcgtggtttttgattaatgcagttgagagaacttgtaagaagtcttcacgctgtctgcgaatcttgtcgtgcagtctggcaactgataagcgctgcttttgatagttttttgctagccgcaaattgcgtccttcttttttagcccggcgctgcctgcgagataatactcgttgagcacgagccagcttctttttggctttgcggtaaaagcgtggattagcgaccattgatccatttgaatccgttaagaaattatcaaggttgagatctattccaagttgactctgcgtcttaggcaaggctttaacaaaggcaatatcgctgcctaactgcattgataagtagaattgctcgtcagcggtcttttttatcgtcactgtcccaattctagttgagatatgattaagcaagcgctctttaatcagttttctaaaaccagcaatgcggacaacgcctagcttaggcaatttaatatgcttagcatcaataaacctagctgtcccgttatcaagaaaagcttctggctgcttaggatattgacagttggtctgatatgaccagtcgctgcgttttttatggaaagttgggattccatgaccaatcttacgatagttgttccaagccttctgataattttgaatggcattggcaagagcgaggctatcaatttctttaacacgcaaaaagctataagtatcgcggatattctttggcttagccaatagttcgctattagtgactacttcttctgccaacctagtctcataattattaagaatagaaaaggcaaaaggcattgcttgatattgtctaacagctaagtagcccttagcatgataattacttcgattacgtcctacataagagttgtagacaaagcgctgcgcatcatagtttagcttaatgattttcttttgcttagaactaggataaaagcgaagcttaacgccaaaatgataggctaaactgctcatttttttcatgtgtttcacctcctcgtattatataaattgtaattagtcatattgtgataattaatcaaattagtatttgctttttgatcttcacatgttagcctctaattgtcattggctttggtcaactggtctaggttatcacctcctgcagttttgtctgctttataagtctgccacccagacagttcctttatgctctaactcacatgctgtattgattgcttctttttgctagtccttgagcaattgggattaggtgcagctttcaaagaagcaaccagtgaatacttatactggcgagattgaacttaagaactgtaattaggggttaacatgtgaagatcaaaatctatgatcagaaatttgaaagaaaggaggccatttccaatgaaattatttgtcggtattgatgttagttctaaagatttacaggtcgttgcacttgattcagaagatcaaaacaaacgcttaattaacgatagctttgtcaatgatctttatggtgctagtgaactgaaaaaacaaattttagatctagctcaaaataaacactatgatcaaatcattattggcatggaagctacatctatttacagttttcatcctgcttactttttccaaaatgacgaagatttacaaaagctcaatgtagagactgatgtaattaaccccaaagaaaccagcaggtttcataaagtctttgaagaaagtaaaactgatcctctcgatgcttattacattgctttgtatctaagctttggacattatcgagtaagcattgccagacaagacaactatcttgctttagagcgtttaacgcgtaccagatatgaattagttcaagaactgactcgtaccaaacagcacttcattgaagctttatattatcgggttaataaactaatcactgtcgataaagataagattaatactcctcttttcggtgctacaatgatgtctattgtaaccgatagtaaaactctggatgagatcgcggatatgcctaccgaagacttaatttcttacttacaggttaaaggcagaggacgcttttccgatccagataccttggctaaagcaattaagaaagctgttagaggttcatatcgcttaggcaaagtaatgactgattcaattgatgcagtgctttctgttcattacaacatgattcaaagctttaatgaatctattaaagatctagaaaaagcaattgatcgtatcgttgatgcattaccagaaagcaaaattctggaatcaattcccggtattggcaaaacctatacagctggtattatcgctgagatcggaagtatcgatcgctttgataaagaagaacagctggctaagtatgccggcctaacctggaatcaatatcaatcgggagatcacagcaacgaacatactccaatggccaggactggaaacagatatctaagatattacttgattgaagctgccaatctagcaagattacatgatcctgttttcaaaaaatattaccaaaagaagtatgatgaagctgtctactcgccgcataaacgtgcttgcacattaactgcaagaaaattagtacgagttatctttaaattgctcaaagatgacaaactgtacaggacaccgaggtcttaatttcaaaaattggtctaaatttaaaagtaaacaaaagtttaacattaaaaaaatcaacctttaccaaggcttagtttcatatactcaaatttatgatcaaaaagaacaaatatcatcgcctttcatttgacttattaccacatgactcatagattagatatttatattttacagggaagtcgaacatatgtctctattttttaataaaaaagctgactgctaggtcagcttggtcctatccatccccacattaaaatacggggattttcgggcgtttttcattaaatcgatcacacttagtttaagtaaagatatctatgtttatgacatagtaggctatgatgaccgtaaagactgtactattcaagttgacgcaactaataacaagattctaggtcagtctacgcaggtgcttgattatgactacgaaaaagatgcgtctttgaacctaaaaaagacaatttcacgccaagaagctaatgaaattgccctaaaagaattcagtggaggaacaccgatttcatgggaattaactgatgacaataatcaatcaatttgggaagttaaaatgatccacggtaaacacaaacataccgtaaaaattaatgctagaacaaaggctgtaatctaaaataatccccaacttatgcacaagttgaggattattttcttatcttttatctaggttgactatctgcacgtgacttgtaatcaccgttttcagtaccaataattagcttttcgccattcttgataaaatcaggaacttgcacaactaagccagtttccatagtagcaggtttaccaccaccagctacagttgcacccttaatctctggttgtgtttccttaacggtcatttcaacagttgatggcaattcaataccgataatcttgttatcatctgtaaagtccatatcaaccataatgttaggcatcaagaacttaacgtcatcacccaattgatcagctgaaacttcatattgatcataagtatcagtatccatgaaagtataagtattaccttcgccgtaaaggtattgagcctttttcttagttacttcaactaaatccactttttcagttggacgcatggtcttgtggacaactgcaccactcttaacgtcacgcaaatccatttgcataacggtattacccttacctggcttatggtggttagcctttaaaactttgatcaatttgccatcttggctaaaaatcataccttttttcaaattaattgcttgtaccattatttcttctccctttaatttaaacttacctttcgactagtttaaacacgctggaggcaaagcaaatttttttatcaacagtaaataaatcgtattcataatacctagtataccaaattagatgtgccgcaggtatatccgatcaatcaaatgtccgtcagtcttatgcaaaatcaggctagcacgttccttggttggcgcaatatattcacgcaagttgaccagattaaccatctgccaggtttcttcagccaattgaattgcatcttccagcggtccattagccattttatagtaaaaattatctggcttatttttatttaatttaagtacttttctaaagcgttgcatgtaccatttttcaatcaaatcttcttcagcgtcaatataaattgaaaaatcgaaaaagtcactagtcacaacttgtccactctcgggcaattgcaatgtattaattccttcaataatcaatacatcaggattttttacatgaccatatttcccaggtactatatcgcttaattcttgagaatatagtggataaacgatatccttctttccacttaaaacgtctcgtaaaaaatcactgagcaaagtcatattgtaactttcaggaaagcctttgcgaggcattaaattacgccgctttaattcctcattagggtaaataaaaccatccgtggtcatcaagtgtacctttaattctggataggttctactgagcaacaattgtaataaacgcgcagtggttgatttgccaaccgcaaccgaacccgaaataccgatgataaacggagctggtgaaaaacttttatgcaaaaatttgatttgtgctttttgcgcattctttttttgttggtaaactaagtgtaagtaactgatcaaactggtatagatctcatgcacgtcggttaggtcaatcacgtctcctaaagacttgatatcagctaattcttctttggtaatattgactttatctaagggagctaatttagcccattcatttctgttaaaactcgtataatttctcatatatcgtatccatattccttctaaaacactaacttattataatagaaagcgctaaaaatatgaaaaaaataatcctattcggcgattccatttttaacggatatcgtaatggtcaaaatacaaacctagtaactaatttatttcaacaggcactaattaattatgcacaggtggaaaacatttctaaaagcggtgctaccacagttgaaggcgtcgattatttggagcaaatttccccagaacatgatctagttgttgttgaatacggcaataacgatgccgcaacagcttggggcattagtccagaaagctacgaaaagaacttggctcaaatccttagtgcagtaggcaaagccattgttgtgggattgtgcaatcccaatccagaaagtgacatttttcaatattatggtgctgaaagactcgatctttttaacaatatcgcccaaaaagtcgcaaaggcacatggtgcacaatttgtggatattttacctgcaatgagaaacttaaaagacaaatcgacatattatcaagccgacgggcaacatttaactgatcaaggaaatgagtttttagttaatcaaatcgtgccagtaatcaaaaaagacttagcctaagccaagtccctcttcatcatcacatgttctacgccgccttcatcaaacggttcgcctacaacttgatagcccaagctatcatagaaaggctttacccgcatttgggcgtgacagtaaactgcatcaatcttattttgccgtaaaaatttatgcacagctgtaatcattttcgatcctagctgttgtccgcgcgcttcttttgacacagcaacgcgtcctagcatccatttaccatcttcttgaaacagacgacaagtcgctaaggcagtcgtctgtttttgattgagtaaataaacctgaacagcaattaggtcctcatcatctaaatctggtagagttatcttctgttcagccacaaaagtcgtgttgcgcaatctttctacgcaatagaattctctagctgtcatttcatcaatctttttaaaagtaaaattatctatcttcatattacttgcctaaccaactattgtttctgccaaaccatttttcattaagtttacgcaattgaccatttttttgcaattttgctaaaccttgattgaccttctgacgcaaagttttgtctcccttacgcatccccacagcgaacaagtccattggcacgcgatcattctgaattaccttgtattcgctacttttagccatgtgagcaatataatagtcggcataaacttcatctaacagaattccttgaattcgtcctgcattcagatccaagaacgaattagaaatcgtatcatataaaactgttttcttagcatgcagcacatcttgtttagtttcataccactgctctgctgttgaaccagtttgcattcctaattcataattcttcatttgtttaaatgaactaatgtcactatcttttttcacaactaaaacctggcgattacgtaaatatggcttgctaaaagctacttttttctgtcgttctggcgtaatgctgtaaccattccagagtaagtctatcgtaccgttacgcagctctgtaacgttcattgaccaatcaatcgtttgaaaagaaaccttaatgccatattgtttaaagactgccttagctaagtcgatgtcataacccgtcaattggccgtttttcttttcaaagcccattggtacaaaactatcgtctaagccaattaccacttgctttttgctggcaatcttattccatgtatcttgagtattagcttctttttgtacgctttggcaaccagttaaacataatgttaaggccaagacgatacctaaaatccattttttcattgcctaatcctcgcttaacggtcgaaccttgagcatctgatccgccacattctctgcaaaattcaagtcgtgggtgataatcagctgggttaaacccgatttttttaagcttaaaatcattttctcaacttccttacgtaaatttggatctagcgcgctagttggctcatcataacaaagaatccgcggtttcatagccaaagctctagcgatagctactcgctgtttctgcccacctgataactcataaggatactgctgttcacggccacttatttgtagacgttttaacaatacacgcgcatcctgctctgcttcagttttactcttttttaataccaaagtaggtgccaaagtgatattttgtaaaacgctcaaattaggaaaaagattataatcttggaaaacaacgccaaccttgcctgaatcataaggtttaccgtcaatcaaaatttcaccagaatcttttgtttccaaaccggcaataattcttagtaaggtggttttccccgctcctgatggacctacaattgtcataatttctccgtctttcaaggtaaaagagatgtcacgcaaaattcggtgaccgttaaattctttgctcaaattttttacttctaacatattctcacctcaactacttgtaataagaaaagtatttttccagctttttcaaaacaaaagcacaaatactgatcaacagtagataaattacacctactaaaactaacggtactagcgttacgtctctggccattgccacattgccggccctaagcaaatcacctaaaccaatgacataaactagcgatgaatcctttaccaagttaattacttcatttccaattgaaggcaaaacaatttttattacctggggaataataatcttggtcatcgtttgccagcggctcaagcgcaaaactttcgctgcttcaaactggccttcatcaatcgattggaagccgccacgaaaaatttccgcaaaataagccgcataattcaaaacaaaagcaaacaaggctgcttgatagcggggaaagacgatatgaataattggtaagccataaaagacaaagatcaattgcaataataagggcgtgccccgcataatccaaacataaaagttaaccaaccagcgtaatggtttaaacttacttttttcacctaatgagaccaaaattcctaatggcgttgctaaaattaacgtccagaaaaaaatacttaacgtcatgcctgctcctgacaaaagagcgggtaaaatttctgcaatatattttaatgacatactctcaccttcatttttctttcctaataaaaaagccctcttaggattaacctaagaggacgactgctcgtgattccacctcatgttcgcacctgctcacgcagaaatgcctcactaggttgatcattttaaaagaaaaaccctcatagccaaacggctacgagggcgaatgtaatcgcggttccacctcatgtttacaaattgctcacgcaacttgcctcaataagttcaataatcaacctttagctataacgggctatcccggattttcctacttttgttcagaagaccaactcacagatgtgattcatactagcaaatatcttatttccaccagcaaagactctctattactttgactagtattactatttctgttctaagttgtttttaatgttgaataaatcttaaatgatctagcaacttttgtcaattatttttcttcataagtatctggatcaacatcaagcaatggactcttttctccagtataaataatatctagcttatacattgcacgagaggtaatagtataaacaagttgagtttcatccaatttatggtaagcagctttagaggcatcccacatgactaccgcatcaaattctagtcccttagccaagtaagaaggcacaactagagtaccatcaactagtcgctgattagcagtcgcaattaaggtcgtgttttcaccttttttagctaattcttcatgcacaaatttagctgcagctaagtctttggtaataacagctgtcgtacgcttattttgttcattattatgcaaaacgttaactaaaacatcaattgcttcatcatcgttttttctgccccaaattataggcttaggacctttacggttaaaggcttcaatcttttcgccttgacgcaaaatttgcttggtgaaattggtcaattccttagttgaacgatatgatttcgttaattgcaccacatcagttttttcaggatcaaataagccagagatctgcttaagtaagctacgactttcatccttagtaaaaatagcctgattcaagtcacccaacattgtaaacttggcccgtgggaaattatacttcaagtaagctaattgaaatggagtataatcttgaatttcgtcaatgaaggcataacgcatctcaaagtcagtcctgcgaccagtgatcatgtcatacaaatataagtaagctgaaacatcattcatggcaatatggtgctgcttaaagttattcttaacttcttccacatgagccaaccaatcattttcatcaatattccacttagatagatcaaccatcttaggtacagctcgcaaaaagctcaggtattgtgctcgcatattcaaaaagtggttgtgcaaaatacgcttatgcacgcccttcaaggctgataatacaatttttctacctaaaaaggcctcttccttagcctcagactcaaattcttgatcaggtcgatcatataactcatttaattcagattggctcattccttcaatagcgtgtgccacccaagccttcttagtttctggcgtaatctttcgattcaacatcttgatcaattcttcacgcgttgcatcaattcggttggccaacttgtaattttcattgaaagaataatagatctccttaattttttccttatcaaagtaaggtttcttcttatcacggaaataaatattcttaaaaataacaccgcgcttattcaagtgctctgcataacgagtcaacaagttaaagaaattaactgaatccttaaacttagaaatattgctgtctgcggtttgatcttcaaactgtctgaataagttttcaacttccatacctggcaaccgtcgcgcaacaaactgccagtaagtcatttgaaccatattttgttcgcccatttcaggcaaaacattcttaatatagtcattaaacaactggttaggactgaacatgattacatcacttgaagtcaggttgccacgataacgataaagcaaaaaggctatccgctgcaaaatcgcactggttttaccagaacctgccgcaccctggacaaaaagcagatctgctttggtgtttcgaataatcttattttgttcgcgttgaatcgtcgttacgattgacttcatctgcgttgatgatttttctgacaaaacttccaagagcatttgatcaccgattgactcatcagtgtcaaacatgttcacaatcttgccatcttcaatcataaattggcgtttcttagtcatatcaactgtaatttcaccttcaggcgaattataagaaactttacccaatttaccatcataataaattgaagatattggtgcccgccagtcatagatcaagaagtgatcgtccttgtctgcaaaagaacctagaccaatataaatcgtctctgttcggtcctcatttttttctttaaaatcaacccgagcaaaatatggtcgcttctctaaacgctctacagtctctagctgcttagctgaatgttgccaagcatgttcacgttcactcaataattgttgctgctggtggattgacagtgctgtttccattgaagtggaataaccatcataatccaatttaacatcgtcaaaaaagtgtgaattaagctctcttgcttcgccttcagctgatttgatagatttttttaaagttttttcgcggtccttgatctgacccataatattatcaaggtgcttttgttcaagttctttttcgtttttttcagttttggctgtagccatctaatcaccttttctttaaaaattcgcataccattttaccatgaatagcgctttcataatagttttcctgctcgtgagaaaaatataaataaaaattgatgaaaactttaactttagagactataatcttgacatattggggtgatatatacatgaaaagattttttaaattactgagaaatgttctcttgcttgctcttatcgctcttggcgtttggacttatcagaacaatcccaatattcgtatcgcaacgcaagactccctagctacacttagctatcgaattaacgaacttctaactaacgaaacgaccatttctcccaataacgaaaaaaagactactaatatcaaaactgacacagataaaacagaaaatgacgattcttcagacaatcgtgtatggtcaaatcctgaagctaaggtttatatcgatattagcaataatgctcaactaagatcagctgcagtcaatgcaatgaacgcttggaatcgtaccggtgcttttacttttcaccaaataaatgataaaaaagacgctcaaatcgtcattaatacagtcgataatagcgacactaatgccgcaggagaaacagcaactacctataaccctgctacaggacatttgttaaaggccacggtcaacttgaaccgttactatttgcaaaacgaatggtatggttacagttacaatcgaatcgttaatactgctgaacacgaattaggccacgcaattggcttaaaccacactaataatgtctcagtcatgtacccaaagggttcgatctatacgattcaaccgcaagatattaaaactgttaaaaagatctaccacgaaaataattaactttaaaagctcacctcttttttctacaataaagtgtgagctttttacgaggagaaaaatatgaaaagaatttatatcgtccgtcacggtcaaacttatatcaatcgctacaataagatgcaaggttggtgtgacacaccattaactacaccaggaattgaaggcgctgaagaagctggtaaagctttaagcgaagtaccttttgacattgcattgtctagtgatcttaagagagcaagtgatacctgtgagatcatcatgaaatataacgccaacaaagacgaattgcagcacatcgctagtccatttttcagagaacaattctacggctacttcgaaggaatggattccgaaatggcttggcgaatgattggtggcagtcacggctacggaacacggcaagaaatgtttgctcatgagagcatcgatactattaaggattggattaaagaagccgatccttatcaccaagcagaaaacgctgaagaatattgggctcgtcttgatgatggttttaaattaatcagtcaattggatggcgctgaaaacattctgctagttactcacggcttcactattagaagtctctggtatcgttatggtgaccatattcctttggttccaggtcctaagaatgcttcaatcactattatgacaatgagtgagaaaggcgaaattaagatacctaagtggaatttaatgcatttatagcaaaataagattaggcgaatcgggcctaatcttattttgtttgtttcccggatttaaaattgaagtgcaacactaagtgttaaacaaaaaggccatgaagacctaaacttgaagtgacgaaaaatcaagaaaggaagatcttcatgaccaattcaaattctagcatttctaagcactatcatcaattaaccagcgtacaacgtggacaaattcaagcaatgctggattccggcataacttcccgtactgttatcgctcaagaagttggctgccataagtcgacaatcagtcgcgaaatcaaacgcggaagcgtcctgcaaagagacagcagctatttattgtatgagcactattacgctgatactgcacagatttattatgagaagcgtcgcaaaaactgctatcagcgcaatccattgaagcattatgctgtctttttgagaatgctctccagacgctttaaagctaaatttgatgccaccagcatcgatgaattcgttggtgaattcaaaaggactatgccaggctacccttgtcccagcacaccaactgtctatcgctatattgatcagggcttgctggacataagcaatattgatctgcctatgaagctcaaaagacgcaggaacaagtgtcatcacggccatagcggtcatgctttgcacaagaagcatcttggcaattccattgaacagcgtcctaaagagattgaagacagaaaaacgccgctgcactgggaaggagatctggttaaaggcgtcagacgcaagaatcagcctgctttaatgactttgaccgaaagaaccacacgctttgaagtagttatcaagattcctgactatcgggcaagcacatgccaaaggctgcttcaaaatgagattgacagacatcctgcctggtttaaatcgatcacgtttgacaatggctctgagtttgcggatatgaccgagatcaaaggctgccagatctacttcgcccacccatattctccatgggaaagaggcaccaatgagaactgcaatggacttctgcgtcaattcttccctaaaggcaaaagcatgaaagataagtcagctgcttatgttcaacaggcaactgatgccattaaccgcaaacatcgtcgaatccttcaatatcacacagcagaagaactcttcaagcaatatatttcctcatagcctaactgttgcacttaatttgacaattcaggattttgtttgtttaattatttttgcaaaacaatatttttatatagcttcactgttattaaaaaacttcctgaaactgtcaaatcttttgtgtaaatagttctttctcgtaaattgattttttaattatttatttaatcaaagtaggattctaaggtgtcctgaacctgaccaaagcctttatgaattcgattgaaataacggtcattgtagctcattgcctgaataccaataaaagcatcaagcgactgttcagttggaaactctgccttaggcttagctttgcgcttgatcacattgttaaatgattcaatcatgttagtcgaataaattgaagctctgatctgcttgggatagttataaaagaccagcagatctggttctatgtctttcaagcttctgataacatggctgtaaaccttgccccatttggtatagaagtcatgcaggacagctgtggcttcttctttgtttgtctgttgatgcacctgtttgaattcgttcatgatcttttcacgatcgtcgacgcgtactttagcgcagatattgcgcatgacatgaaccaaacagcgttgaaaatgagctttaggataagtcctggccaaggctgttttcatgccaacaacaccatcagaaagaaagagttcaacttgcttcaagcctctggacttcatgttttgaagcatctctgtccagacttcaatgttctcactaggagcaatgcagtagtcaatgacttccttatgtccattaggtttaatgccaatggcaatatagactgcttcacgctcaacgctcaaacgtttctcggcgcaaaggaaggtatgtcgcatccaaatagacgcagaaaaacttgtcgcttagcttgcgtttgtggtaagcctcaacctttggaatcatctgcttggaaatatttgatacctgagctggactgtaatggctgccatacatcttttcaattagatcggctatttccctggtggtcacgcccttggagtaaagcttgataatcatgctttccaagatatccgagtgctgcttgtagtcaggcagcgtgtgctgatgaaattgaccgttgcgatcccgaggcacttgcacttcaattgggccaaattgcgtatcaactttgcggaaataagcaccatttctagagttgccagtattccagccatttctggcatagggatcatagcccagaaaggcagtcaattcagcttctagcaagttattaacagcctgttgtagttctttgcgcaataaatcatttattttgtctggattgaatagagcttgagcaaaatctttggtaaaatcattcatgaaggagttcttctttctgtatgtgtttttttgttcaaaccaatcatacgagaaaggaactcctttttctaatgtttaaagaaataaatttaaggaatcattcatccttacacaaactattttacagtctcaacttcctactatttttaacagtaggaagtcttactctaactaatctttagtcacttgttttagtttttattaacttacagtcgcccaaagtctgaatcaattgtttgccatctttttggtggaaaacagcgttttgatacgacaatcgttctttctttttactcttatctttatactttttaataaaggttacttcatagttaatccgactataattacgcttacctggtaaaacagagagcaccttgatctttacacttaatttcttgatactcttctttttatgccattcctttagttgcttagcaatcttcttatagtctgcattttcttttccattttcaaagtcatctgcatttggcgacttaagggtgttgtacaatagcttagctgcatccccaaccttaatcaagccaggccaaatcgggttaacaatatagtcaccttctgcatcctgatagacatctttttcgccattgccttgatattcagcagtaccatcataatcagtgacgtcatcctcactattagaaaattctgaactaatcgactgcgacaaatccgttaccctttcggacttaatagtttgaccatctgccttactcttaatatagatttccattcgcttagcaatcggataatccttgaaagtatagctaccatgctggttcaatttacccgccttacgatcattgatatagatcgtaccattaggaacgctgcgcacttggaaagtggccgttttgatcttcatatcaacagtcttatctgaccaaatgttaacaatcgaatcagcatctaaatggcgaccattaaccttagatttaactaatatatgatagcgaccaggaaagaccatacctaaatcttgatagtaattctgattgccaccttccatttcaccataatccttttggttaaccgtcaaagttgaattagcgtgattggtcttcacctgtgggcgatatacttgtatccacaacttatattttggaaaaagcaaaaaattgcgtccatcttgaatcagtctgatttcaccatgatcgcgattatgacgcaaattataggctaaacgtttagctgcactgtgatgctctttaaagtaattttgaagcggcttcagcgatttatctgtcacatccatatcaggcgttgaagccgtgacatactgagctagctcagttttaggatcctgcattttagctacaatgcggtcaatttgacgttctttagtgtaataaaaattgccaattagccatgcaataccaattaacaggataataactcccgatatccaaattttcttatgttttttcattgatcaaaacaccttttcacaaatccttttaacttagattaacaagttgatcaaaaaaagcaaacatcttttgttcacaaatcaagacgaagttcttattatatttagtagcattattttattttggaggggattgcacagtggaagtaaattttgattttgtaaaaaatagcagcttcaaggaagcctttcctaccgctgaaaaaatccacaaattatacacaattgatgattatcgtgacgttatttcaaattcacgtcttctattagagagtctaatcaaaaaaatttttaagttagaaaatctcagtccatattacacagttcatgatggcgaacaccgtaatttgcgtaataatacacattatttacgcaatgaactagattaccctctttcgatcatggatttatttgacgaaatacgctgcatgggcaacgctgctgtccacgataaccaaattgaaccagatcaaaagcaagcctggcactgtatttgtgatttacacgatattcttgtctttttaattaacagctatgacggtcaagacctatattatttgcgtcccgatattgcgatggaagcacaaactgatgaagaccattattatgtgcgccaaaataagcaaccaaaaataatgaaattgcatgatcatcaaaatactaagaaaaaacagtccgcatctgcaccaaaaaaggcgaaacatgttaaacatttttccagtaaacagcatatagagcaaactaactctgagtcacaaacgaaaactactccttccactaaagacaattggttaagaaaaattaaagaactctttcaccatgattagtcatattgacactatgtcacaatatgataaactatatattatataatttacataccgagaagcgcctatgacgctgccgatacgcaaatgaaaactgaacaagtttctcaaatggggaacggcttatgctagtaggtcgttttccattatttttttacgaaaggagtggttagtccgctatggataatcacaggcaaaaaccttgggctgtcgaacagtctgaggtattaacaaatacaaaaacaaccgaaactggtttaactgaagacgaagttcgaatacgccagcaagctggtttaaacgagctcgcagctaaacctcttaaaacagtaatccaaatggtcaaagagcagatttttgatccaatgatcggtatcttattagtagctgccctcttatctgctatgtttggcgaatataccgaagccattattatcgcgacaatcgtggttcttaataccattattggagtagttcaggaaaagaaggcacagtcttctttagctgcgttatgtgacatatctgcgccaactgcccatgtaattcgtaatggcaaagaattaatcataccggccaaggaattagtagttggtgatattgttaccttgcatgatggggacatggttccagccgattttcgcttaattgaaacagctaacttgaaaattcaagaagcatcccttactggtgaatcagtaccggtagaaaaagacgcagctgctgttttaaattcagattgtgctcttggtgaccgcatcaatatggctttttcttcctcaattgtgacttatggtcgtggtcaaggcgtcgtgacagcaattgggatgcaaacagaaatgggtgccattgctggcatgttagaagatcaaactgaagtacaaacaccattgaaacgcaaattagctaaagccggcatggtcttaacgactatcggcttaattatttgtagtttggtctttgcaattggtgctttctatggccgtccacttttaccacaattcttggttgctatctcattggcaatttcaattattccagaaggtctgccagcaaccgcgacaattgttatggccttaggcgttaaacgcatggttaagcgtaacgctttgatcaaaaagctgccagcagtcgaaaccttaggtaacgccactgtcatctgttccgacaaaactggtactttaaccttaaacaaaatgactgttacacaggcagcaacgaatgacttcagccaaagtcacgtagttgaccagcttgcagcaaacaaaaccaatcaaactttggcctatgctagcgctctttgtaacgatgccagcttgaacggtgaaaaagagattggtgatccaactgaggtagccttaattccttttgcccaaaagcttggctttaaccaatctaacttaaagaaagaattcccccgtttgttcgaacaaccctttgattcggacagaaaacggatgacaacattgcacaaaattgacggtcaattaacggtcttcactaagggtgcaacggacgaaatgttgccgttatgtacacacattatgactgacaatggcgtgcgtaaaattacaccccaagacaaaaagcaaattgcccacttgtctcaccaaatgcaagctgacgctttacgagtactaggctttgctaccaaaatagtggataacttacctgaagcaaatgctgatttggaaaataatttgacttttatcgggattgtcggcatgattgacccaccacgaaaagaagttgcagcatcagttaaaacctgccgtgaagccggtattcgcacaattatgattaccggtgaccacaaggtaactgccttggcaattgcgaaaaagttaaacatttatcagacaggtgacttagcaatctcgggaactgaattagaccaaatgtctgatgcagaattagatcaagctgttgaaaaggctaccgtttttgctcgcgtttctcctgctgacaaactgcgcatcattcaaagcttaaagcgaaattgtgaggtaacagctatgaccggtgacggagtaaacgattcacctgccttaaaggctgccgatatcggtgtcgctatgggtgtaacgggtacagacgtggctaaggacgtggctgatatgattttgcttgatgatagttttaccacaattgcgcacgctatcaaggaaggtcgccgcgtttaccgcaacatccaaaaagtaattcagttcttgctagttggtaacattgctgaaattaccactttgtttgcggcaactatttttaactgggatgcgccattattggcagtacacatcttgtgggttaacttagctacagctactctacctgcccttgctcttggcgtagacccagcaagtaaaaacattatgaaacacaagccagttaaagctggtactttattcgaaaaagacctagttattcgggttattacccaaggaatatttgttgccctgcttactttaactggttacttcattggtaaagaaaccggcaatcaagttgttggacaaaccatggccttcagtattttagcattggcccaaatgattcgttcatttaaccagcattcaaatactgatcccatctggaaaagatcatctggtaataatccatggttaacagtgtcattcattatctctgcatttttcatgggtattattctctttgtcccagcaatgcaagatgcatttcacattaccagtttgtcagctggacaatggttaatcgtagttaccctagctttactttcaattgcacaagttgagttagtaaaaggttgggcaaagtttagaaatatttttattaatgacaataatttaattgaagattaattagttacaaaaagacggtagtacaacactatcgtcttttttgatattaaactttggctgctgccaattggtcaacatctatctgactacgaccaatctgaattgccttttcggtactttcattcaagctagcattgatcatcttatggctaagctccagcaccattggcaaattaacaccgctaattacccgtactcgctcaggatacatatcttcatattccgaagcgactaagtggggtgtcccattttttaaatcagttagcaccaaaatctgactattctgatatttattcatgactttagcaaaacgagccttaaaatctctgattcctgtgtcgtttaattcaattgtcaggatctgatcattcttgcctgccaacatatcatgtgcagacattagccccgcagccaacccttcatgagttgcaattaaaagttccataaaacgcacctctttgtaagcgatttctatagaaccattttaacatatttttgtattaattaagctgttcaatatctgctaataagctactttgttcaggtgttagccgctcatccttttgccgtaacttaagtacttgtagacaagtgtgcaaaatcttttttccttgttccgtcacttgtttgccatccatatcaggcgttacactggctaaaaagtcatccatctcatcagcagtaaccttgaaaacatcattttctccatgaatcaagggcatccgattgagcatttcttcaatcatttgtaatttatttctagcttcttcaaaatctatcttgttcacatccaattctttttcttttattatacaaaaaaacagccacctaagtgactgtcatctttatttcgtattaataattgcgtttgaaattgtagttgcattagattcgatcagttgatgtgaattattaataaaaagggaagccccaattcctatagcagcaaatacaagccaaactttctgtaaaactgtactcttcatgttcccagctccttatatttcttattatataaaaagccgatcgttatggggatggctacgcttacaattaacataattgtaatattatttacctttacttaagagttacttctccagcaacatttgtatcaaaaaagtcagcaatttgatggacgtccatcccttgccctaaagcccacattaatttggtaatcgcactctcagaagtcatatcacaagcagaaatagctccttccagtaaagcctcacgccccacctcatatttggtcaaatcgctacgttcatacaagcattgactgctggctacaacgggaataccttgacgaattagcataccaattgcggctaccatgttgcggcgaataaagttcatcccgcctagaccatatgcttcaataacaattccacggcaaccactattaaccatcgcaaaaagcagattaggatcaaagcctggaaatagtttcaccaacgatacgtgtgaattaattttggtattcaaggttggctgaccgtcatgttctctttgaaaatgttctgaattaaaaactaatccatcggaagaaacggttgctactggtggcacattcacactttcaaaagcatcaaagttggtagtccgcacctttacactgcggcagcccagcataactttattatgaaaggctaaataaacatcaggtggacaagttgctgcagctgcaaaagccaaccgtaggttatcgtgagcgtcacttaggaccacgttaattggtacctgacttcccgtcagcacaaccgggatattaatatttttcagcataaacgacaacattgatgccgtataagccatagtatcagtaccgtgtgaaacaacaattccatcgtaatcattgcggtatttgtagatattttctgcaataaatttccattcttctggttggatattagaagaatctaattgcaaaatatcgcggacttgaatgtcgtacggcaactttcccaacattttaattaactcttcaccggtttccttgggtactaggcctgcatcagaagcaacggaagcaatagttcccccagttgatagcaataatattttcttcatcttgttcccctttatctcaaatcacaatgtcgaccataactattcatgattagatcaattaaaacataggccgaactaaaagttaccgcattttgcttactaaattgaaattgcgtagttttgaagaaaaagctatagtcgctaagagaggctaattttcccgtttgccagctagtcagtgacaccaatttcagttcagtattcacgacatcaatcttcttaagttcttcaataattgttttattaaaaccaccaaatgaaataacaaacagcatgtcattttcccgtgcagaccgccctaataatgccacttcgtcgcgtgcactaggcaaaataattgcttttttaccaattaagaaaaagttatgcgccaaatattccgcgataatttgctgctgccagccagtagagtaaagatagatcgtttccgcttgatctaaatccgcaaaaaatggttgtaagtttaatcccttaaaatatttaaaagtttcagcaatgatcttttgtaaatccgtattgaaatctagcgtttgcttgttcttaacgttttgctcctttcgtgtagctaactcggacaattcaaatttcaattcgctgaaaccgcttaatcccaattttttgcttaggcgaaaaatagcggacttagaaacgtataatttctgagctaattccagcaaactcaactgacttgctacttcaggatatttcaataaatagctaacgatcgctttatcggtctcattaaaactttcctttttcttcatgaccgctgtttctaaatccattctgtttcctttctcatcactgtttcttattaagaaaagaatatcatgtcgtactcaaaaaaggtagccaccctatttgagtaactaccttaatttttattcttgaattgaagttatgttatgacaattaattatttaagttctggccagtatggagcattaactggaatcatgtcatccaaaatcttcttagcaacggaagcatctggtacagtcttgtttaatgcaaatgcttgcagcatcttattgtatgaatgttcaacataagcatcaacaaccaatttttcacaagtttgttgttccatcatcaagcctctttggaagcgacctgctttacccgtagccattggttgaatgccatcagcaccaaacaatgctggtacttcaacaattgaatctggatccatattagaaattgcaccgttattagcacagttagctaagaacttttcatgagtgttaaatgcgatcgcatgacaaatatctacgatatattcagagtgcaaacctgaaatatcccaaatattattcttagcagttcccacctttacgattctttcacattcgccaaagacaatcttttgccggtgttcacgaatttcatcagtacgagtatgcttcggatcagcattagcaacttcatattgtgggaagtagtagtattgcatgtaattgtttggcaaagtttctggctctagcttatattcatcggcaactttcttaaaggtggcttcccaagaagcttcagtatccttgtcgtaatcgccacctacccaatagccgtgctctttgacatattccttcaacttaggcattaagtcttcgccagtcttcttgttgcgaacttctttccaccagccaaaatgattcaaaccataatagttaaagtcaatatcatgccaactgtccaaaccacaaatggcagccattctgtccatatcatcaatcggcatatcacaaatgttaattaccttagcatttggacgaagacgacggcaagcttctgcaacgattgcaattgtgttggagtagttgatcatccaagcatttggtgagtattcttccatccaatcaataatttgcaaaattgcgggaattgagcgaagaccataggccattcctccgggtccagtagtttcttgaccattcacgccatattttaatggaatcttttcatccaagcttctcatgtgatatttaccaacacgaattgatcccataacaaaatctacatcagtaaaggcctctttaggatcagttgtgtaagaaaacttaatttgaggtgctctttccttcatgataatttcaacagctttggcaatcttttcttgccgttcagcatcgttatcatagaacttcaactgtcttaatgggaatttatcctgactcttgattaaatcaaggacaaatcctggagtaaaagtactaccaccgccagcaataactactgaatatttcttaccatccataatctattttctcctttaaataaaactaagtttttatctctgtttcatttgccttacgcatatatttatatcatcttctcccacaaatgtattcgttttcaccagcttcagactttgtttcaagttttggaacgcgtttcactacgcgaaatatttttaaattttgccttaagcctaacaaatcaggtgtttaacttgcctttattagtaatagtgtaaaaatgaaaaaaataatcgtttcatgaccaagataaactataatttgaacattcctttaaccacaaaaataaatagtccgtatttgatgatcgtatagttttaatgaaactgtcaaatcttttgtgtaaatagatctttctcgtaaattgattttttaattatttatttaatcaaagtaggattctaaggtgtcctgaacctgaccaaagcctttatgaattcgattgaaataacggtcattgtagctcattgcctgaataccaataaaagcatcaagcgactgttcagttggaaactctgccttaggcttagctttgcgcttgatcacattgttaaatgattcaatcatgttagtcgaataaattgaagctctgatctgcttgggatagttataaaagaccagcagatctggttctatgtctttcaagcttctgataacatggctgtaaaccttgccccatttggtatagaagtcatgcaggacagctgtggcttcttctttgtttgtctgttgatgcacctgtttgaattcgttcatgatcttttcacgatcgtcgacgcgtactttagcgcagatattgcgcatgacatgaaccaaacagcgttgaaaatgagctttaggataagtcctggccaaggctgttttcatgccaacaacaccatcagaaagaaaaagctcaacttgctttaagcctcgggatttcatgttttgaagcatatctgtccagacttcaatgttctcgctaggcgcaatgcagtagtcaatgacctccttgtgcccattaggcttgatgccaatggcaatatagactgcttcgcgctcaaatgtttctcggcgcaaaggaaggtatgtcgcatccaaatagacgcagaaaaacttgtcgcttagcttgcgtttgtggtaagcctcaacctttggaatcatctgcttggaaatatttgatacctgagctggactgtaatggctgccatacatcttttcaattagatcggctatttccctggtggtcacgcccttggagtaaagcttgataatcatgctttccaagatatccgagtgctgcttgtagtcaggcagcgtgtgatgatgaaattgaccgttgcgatcccgaggcacttgcacttcaattgggccaaattgcgtatgaactttgcggaaataagcaccatttctagagttgccagtattccagccatttctggcatagggatcatagcccagaaaggcagtcaattcagcttctaacaagttattaacagcctgttgtagctctttgcgcaataaatcatttattttgtctggattgaatagagcttgagcaaaatctttggtaaaatcattcatgaaggagttcttctttctgtatgtgtttttttgttcaaaccaatcatacgagaaaggaactcctttttctaatgtttaaagaaataaatttaaggaatcattcatccttacacaaactattttacagtctcataatatatttttctttacttggctctggaacaactataaaatcacttttttctattttaagtaaatcctcatcctctatattttctatttttttcttaatccagatagataatcctgtatcattattttttcttcgatcatttaacccatctataaatcttctaagatcattatttgcatgacttaaataaatacaataattaggttcattagaaggcagcttatgcactacttcctttacctttccaatagcttcaacgtcagacttaacttgtcctgaaataaccctatttttatcttcattcaacactttaaaatcatttttgttttctggttgaactcctacaaaacctggtgtcatatagttttgtaaaaatgcatccaaagttgcatagtcctgatattcaaagcccttagaagcagttactccaccttgtcctttatttggcaatatccatctctcctttatagtatttttatgaaaccattattgttaatttcgacacaacttttttctgttaaaataaatatttgctattttttcattatacataatctttacgtccaaaagcatatcaaaaataccgactatagtttaaattctctcctaaatcccacttaacttcaatcaatctacgatgaggcaccccagaatttcatttagcctagcgcacattatgaagccaagttccttactctgttccaacaactcacgcaaatccttttcagtctttacataagatgcattttcactcaaagcaacaaaatcatcaacaattttcttcaccatctcttgtcactcttcctcattattcatcgccattagtcttccttttaaaaaatctgcttcaactcaggaatctcttcaagtaatctatcacacccattaaccatattctttactattcaatgattgcggtcaaccttactatgaccaaatgtctccaaaacaaaaagccagcatttgcgctggccatctttgattataaaaggttgttcttcaatattatgcaacactacgttactgttaacttaacttttgtgccaatttcaaaatatacttgcgcagatcttccttggtttcaggatggttcaagccatattcaatcgaggtttcgagataaccttccttgttaccaacatcatgccgcttttccttgaacacatgggcaaatcgtcttgttcaatgtatcaattgcatcagtcaactgaacttctccacctcgaccgggcttggtttcagccaaaatatcaaaaatttctggcgttaataaataacgaccaatgatcactagatcacttggtgctttatcaatagctggcttttcaacaaaattcttcacattataaagactgtcgttgaccttgccatctggcgcaatgacaccatactttgaaacttccttgtgtgagaccttcattacagcaatgtagaagcatgagtctgctcatagtcattcatcaactgcttagttaatgggattttatcatccatgcagatcgtcgcctagcattacaacaaatggctcgcctgccacgaaactttttgctcgataaattgcatctcccagaccagccggatggggttgacgagtatagtacaaatttactcccaagtcagtaataccttgagtcagctttagcaattctaactttccagttttttcaagatcttgctctaattctggatttgagtcaaagtggttttcaatgacacgcttattctttccagtaacgatcaaaatatcttcaatcccagattttttagcctcttcaacaataaattgaatggttagtttaacatacaccagatgaaatatttgagatcgaatctatcaagcagcctaagtgttcaattcattattgcaattttcaatttttaatctttactattcaatatttaatttacgtctttaattggtggtattacaaatctattattcatatatgatggcttaaaatctaatttcttaaatttagtatcctctcttgagatcatttctcccatttcattaccagatacattgctattatttccgttaacaaaataatattgtgcatcttcaaacatatcctcttcttttgctcctttactaaactcacagaatcctaattcaccagctgaggttaaaaattttatgatcatattagtcagttttatttttgagctataatcattaggtattataaataattgctcattagacgaaaagcccgaatacgaataagtatctattacattttcgccgcaactatcagtataagtcagttttattgccaaattataaacaacattaggcgatatattaataatttgtattttagaatacttacttccattatcttgtaaaactttttttactatttgcgtatcatgtttacatgctaaagtaacgatttctttgtagttttttatagttgatgcggatttaacatcaaatctaggacgtttttcttcaatatcatttgcctttttaattttattttgatttttaacctgtgcaaaacctgctatcaccgcagcaatagtaccgaagccacctatccattcagcaacactgcctaatacctctccattagcattaatcattgcacctatcaatattccgaatcctaagcaaaaaagtgatactaatatcccatacacatatctatcatctatatttttttccttcttttgcattatttcatattcatccttttctcttttcctaggcatttcaataaatatcggttttgaaaaaatgtttccctcagagtcattatatataacaagtaaactatattcattgccaactaattttacttttcgaaactgtcaaatcttttgtgtaaatagatctttctcgtaaattgattttttaattatttatttaatcaaagtaggattctaaggtgtcctgaacctgaccaaagcctttatgaattcgattgaaataacggtcattgtagctcattgcctgaatgccaataaaagcatcaagcgactgttcagttggaaactctgccttaggcttagctttgcgcttgatcacattgttaaatgattcaatcatgttagtcgaataaattgaagctctgatctgcttgggatagttataaaagaccagcagatctggttctatgtctttcaagcttctgataacatggctgtaaaccttgccccatttggtatagaagtcatgcaggacagctgtggcttcttctttgtttgtctgttgatgcacctgtttgaattcgttcatgatcttttcacgatcgtcgacgcgtactttagcgcagatattgcgcatgacatgaaccaaacagcgttgaaaatgagctttaggataagtcctggccaaggctgttttcatgccaacaacaccatcagaaagaaaaagctcaacttgctttaagcctcgggatttcatgttttgaagcatatctgtccagacttcaatgttctcgctaggtgcaatgcagtagtcaatgacctccttgtgcccattaggcttgatgccaatggcaatatagactgcttcacgctcaaatgtttctcggcgcaaaggaaggtatgtcgcatccaaatagacgcagaaaaacttgtcgcttagcttgcgtttgtggtaagcctcaacctttggaatcatctgcttggaaatatttgatacctgagctggactgtaatggctgccatacatcttttcaattagatcggctatttccctggtggtcacgcccttggagtaaagcttgataatcatgctttccaagatatccgagtgctgcttgtagtcaggcagcgtgtgctgatgaaattgaccgttgcgatcccggggcacttgcacttcaattgggccaaattgcgtatcaactttgcggaaataagcaccatttctagagttgccagtattccagccatttctggcatagggatcatagcccagaaaggcggtcaattcagcttctaacaagttattaacagcctgttgtagctctttgcgcaataaatcatttattttgtctggattgaatagagcttgagcaaaatctttggtaaaatcattcatgaaggagttcttctttctgtatgtgtttttttgttcaaaccaatcatacgagaaaggaactcctttttctaatgtttaaagaaataaatttaaggaatcattcatccttacacaaactattttacagtctctacttttctactttttaaagctgttaaaatatctttaattcttatattatattctctacccaatgaatatggcttcacttgttcaggtactgaagctatagaaactttctctcttgacctggtcttatgaattggcataaaaacaatattatcttttggtacatcataagaatgcaatttattttcgtcattttgtaagcaaaagcctctaaattggattacttcttcagtattaccattccaaagagctgttagtttaaactcatcttttgaagagaaaacaattttttcagaattattaattacatttttagtaagtattttcacatctacaattggttcatgggataatctatttaaaactggtattaaagcaaagctcaataaacttattagaccatgatacattactgttgttctgggagaagaagatttatcagcagttaaaagcaaaaaactaaaaatactggctgctattattatacatgcactcattatattcactaattttgcaggatatctatttataaaaacagctaattttaccctataatctgataaaaagcacatacttaccattaaaacgacaatgataaaaatatatatcatatatccaggcgcctcaatttcagaagttaaaaataaatatacgttaattaaaatagctgtatatacagttgatatagctactataagtccattaactttattttgaaaaaagcttttcattcctgttctccaaaaaaatagccagctcatcagctgactacaaacttactttcccaacttctcccgaatcaacttcttagcctcatccacaataggcgctcttagcagcatcaccataacaccgacaacaccaacaataacttcgagtcccatcattagccaagaatctttcaagtgtgtattcatccaaaaaactggcaaaaacattactacaccagagaccaaatacttccataggctgttaaatagagtcctatagctcaacaaaccacgaaccgcaatcagttgatacaaagtaacactaatttcggacaaaacagttgaccacatggcaccattcaaaccataaaagtgaatcaacgggaaatttaaaattatgtttactacggcacccactgtaacagaaattgtaaattgcttctgatggtgaattggtaataggtactgcacgccaagtgcgttactccaagcaatcatcaaaatcacgatagactcaatcatcattgctggacctactggaccatagccgggaccataatattttggagctaatgttaaggagattgctgccaagccaaacatcattggtacagccatagccgatacaaaatcaaaagacttatacaacatctgatttaccttcttcatgtcaccatgtgataccgcattggctacatgtggcaacatgactgtaccagttgctgtcactaaagccaaaatcaacttcactaagctatcagaatattgatagtaaccagatgctgtttcattaaccatgacgcccaacatcgtacgattcaattgtacataaacttgagtagctatttgcggtatgaaaagctcaaccattggtaaaaagtgaatccaaggatttaaactcctaatcttaaccttaggcaaatctcgataaatatccggccacaaagttaagttacctagtagagttgacaatgccaatactacaatatataaagttacatcatagggtcccttgataaaaacgaagatcgctatcattgatacaatctttaccagtgagttctttaaaaccgttactttaaagttttcaacaccttcataaaaccaagaaatgtcaaaagccacagcaattagattaagcgactgagccaacatataatcaaactgtcgagtataaaaaataaggaagatttcaaaagcaataattgatacaagagtcattattgttttaactatttgaatctcccaaaaagttttggccattttagttcgattatctcgaacataggctatttgccgattcccataataaccaattcccatactagcaaataagataaagtattgaataatggaatttgtaaaagcattagcacctacaccttcaggtcgtaatacacgactgacatatgccgatgtaataagcggaactattattgctaatacttgataacctacattatagagataatttcgaatgaccttcatttaaaacctattcaccaaattcattatttaccgcatcgagtgcagcatcaattacctgatccatattgtaatacttgtattgaccaagacgaccaccaaagattaccttgtcttgtttctttgctaattcagcatatttagcgtacaaactattatttctatcattattcactgggtaatatggctcgtctccacgcttccaatccgctggatattcccgggtaataatcgtcttatctggatcacccttaccgaattcaaaatgcttgtgttcaattatacgagtgtaggggatttcagcttcagtatagttgatcactgcgttgccttgatagttgccaacattcttttcttcagtttcaaaacgaagtgaacgatattcaagttcacctaatttatagtcaaagaacttatcaatcataccggtgtagacaactttatcatagttattaagatactcttctttatcatcaaaaaaatcagtatttaatttaacttcaatatttggatgatcaagcatcttttccaccatttttgtgtaaccaccaataggaataccttggtaatcatcattgaagtaattgttatcgtaaatcaaacgcactggaagacgcttgataataaaagcaggcaattcagtacatggtctgccccactgcttttctgtataacccttgatcaacttttcatagatgtcacgtccaattaaagaaatagcttgttcctcaaggttttgtggttccttgcctgccatttcttgtcgttgttcattgatcttagccatagcttcttgcggagtccctactccccacatctcgctaaaagtattcatattaaatggcagattatacatacgtcctttatagttggcaacaggactattagtataacgattaaattcagcaaattgttgtacataattccaaacttctttgtttgaagtatgaaaaatgtgagcaccatattgatgaacctgaatcccatctacttctttagtataaatattacctgcaatatgatctcttttttcaattactgtaactttgtttccacgttttgctacttcatgagcaaatactgctccaaaaagaccagaaccaattattagataattattttccatcactattcaaaaaatctctttcaataaaatttctaaaatgtccagaccaagctttccaactggtaagactaaaataaacatttctactttcatcagaaagtctttcaaattctttatttctatatgctttttcaatacacttaccaaaatccccctctccgcgacaatggcagtgtatatccatttttatcatttttaaacaaaacattttgacttccgtatggcatccattttggatttacaggagcaatataacctacttttctacttttctatttttttagagtaacatacatttttgcagtaaagttagctgtttttctattcataaagaatttaaaaaacgttttttttatcatgctattttcaaaataagggactgtatttatctctatatcttgtaattcgtaaactgctgacattatattactccaatacttattattaaaaccattaatagacaccctcttatattctgccaatataagtcgtagttgcatataaagtctatacttaaacttcccacactaaataagccagtaatctcttgatcttgcttggctttaggcttctatattatttttgctagttttctttaacaatttttgcatgtatttgggtaaacgattgataaagtcagccgtgaattcagctatttgtgcttcactggcatgaaagacttgctttacgctggccagcattgcatcagtaatcaattgcaaggaatggctaaaagtaatgtccgccagctcatcaatcatgcaatagaacagctcgcctagcgtgcgttcatcttcatcgtcccgcttggcaactgacataagcatgtagcgagtaaaaactatggcaacatgagcggtcaaagcatcgtaagacaggccatgatattccgtacttagttttagataacttttgcaagttttgaaaaaaacctcaatatcccaacgcttgccgtagttgcggataatttcatcttcgctaagcgacatgtcggtacaaatgattgccagccaatccttgcgattggcacggtttctaacgcagacaatccgtgcatctattttagcaccgtctttgtcctggcgtccgactttgactgggattgacagcaggtagcgagaacggccgcatcgctttttacagctgcgataaatctgtttgatgtttttgcgttctccctcaaattcatatttgattttggagctaaccttaaccatggcaatcacatccagcttcctttgcttgagctggacgatttgatgtggatttgagaaccagctgtcaaacagcacgtacttggcttgatgacctgctttcatagcttggtcgattaaattaaccatcacgtctgtgcctttagtccgggcaagcatacgtctttggccagcaatggtgcgctgatcaaaaactttattttcgccaatcatattctgtagcttctgagaagacagcagcactgaattgattggcatgaaagaagctccatcagtccagcccagggtcatcatgcgaaaacctttcttgtaagtcattgatacatggtcaaaaactttggcgactaattctgttttcttgaagccggtcctagagaagtaggaatcatcgacaacaaagcaatcagcccgtttttctgaagtcaaagatcgcaagtggttattaatgatttgcgcagacagaagtgtggtgaagtggagccaattgacgtgaacgttgcgcataaaacggtaatatgagttcttggaaaaattttcttgaaaatgatccattttcagctgcatatataagctgcggtcacgaaagacattgcttaaaacgtaaagaaacaagctgaacaggctaatgcctttttccttgcggaagccacattttctcaacagcttgatcacctgaaacttcttgatgaagctgatgattgagtttgaaaatagttgttcattttgttggtcaggagatggtaaaatagacattggcacaagcctttcatgcaaataaattatgttttggtcaatataattatagcaatgaaaaggacttgtgccttttatatttgtcaaaacacgcagaatcacaatgaaacaagcaattttgcgtgtgggaagtttaaggtctatacattaaaaaatcgacattattatcgacattattatcgacattattattgttgattatttcaaaagtttttttccacacggttaaataagaaactgtcaaatcttttgtgtaaatagttctttctcgtaaattgattttttaattatttatttaatcaaagtaggattctaaggtgtcctgaacctgaccaaagcctttatgaattcgattgaaataacggtcattgtagctcattgcctggatgccaataaatgcatcaagcgactgttcagttggaaactctgccttaggcttagctttgcgcttgatcacattgttaaatgattcaatcatgttagtcgaataaattgaagctctgatctgcttgggatagttataaaagaccagcagatctggttctatgtctttcaagcttctgataacatggctgtaaaccttgccccatttggtatagaagtcatgcaggacagctgtggcttcttctttgtttgtctgttgatgcacctgtttgaattcgttcatgatcttttcacgatcgtcgacgcgtactttagcgcagatattgcgcatgacatgaaccaaacagcgttgaaaatgagcttttggataagtctgagctaaggctgttttcatgccaacaacaccatcagaaagaaaaagctcaacttgctttaagcctcgggatttcatgttttgaagcatatctgtccagacttcaatgttctcgctaggcgcaatgcagtagtcaatgacctccttgtgcccattaggcttgatgccaatggcaatatagactgcttcacgctcaaatgtttctcggcgcaaaggaaggtatgtcgcatccaaatagacgcagaaaaacttgtcgcttagcttgcgtttgtggtaagcctcaacctttggaatcatctgcttggaaatatttgatacctgagctggactgtaatggctgccatacatcttttcaattagatcggctatttccctggtggtcacgcccttggagtaaagcttgataatcatgctttccaagatatccgagtgctgcttgtagtcaggcagcgtgtgctgatgaaattgaccgttgcgatcccgaggcacttgcacttcaattgggccaaattgcgtatcaactttgcggaaataagcaccatttctagagttgccagtattccagccatttctggcatagggatcatagcccagaaaggcagtcaattcagcttctagcaagttattaacagcctgttgtagttctttgcgcaataaatcatttattttgtctggattgaatagagcttgagcaaaatctttggtaaaatcattcatgaaggagttcttctttctgtatgtgttttttttgttcaaaccaatcatacgagaaaggaactcctttttctaatgtttaaagaaataaatttaaggaatcattcatccttacacaaactattttacagtctcttaaataatcattaattatagactttcttatatcagttgctgtatttcctggtctatcttgtaaataaaaagcgagggctttatcataatatgatactttcttcgctctagacaacgcaaccaaatataacaaaaaatccgtataactcacgtgtttagggaaactaacattttttagcaattgggttttataaagttttgcatgcggtgaaacttgaaaaaaagaaacatactaacctagtgttggatcatgaatcgacggattcacgatctggcactttttattttgtctaaaatagaaagtgaagataaagcaaatcaagtcttcagctttttagacacttgatgtcgtaaaagaaacggactgctttaccacctattcttaagtctcttcgaagtctgtgggcacttagatgccgtgtttagaaaattagaattaataggttgataaagaggtttatcttcacagcggaggttatattatggaatcacaaattattttcggtattgatgttagcagtaaatcttccacagtttgtgtggttaatgaccggatcaaacaaggcgaatcttttagaatctctaatgattcctttggctatcaaaaactttatgagcaactgaaccaatatttgataactcctttagttgttttcgaagctactggtgtttattctctaagcctgcaagctttcttagaggattatcatattaagtatttgaagcttaatccgcttaaagcgaaaaagctaatggacaataatttacgccataataaaactgataaggtagatgcttatcgcctggctttaattcaatttaatgccccgcaaaagctgcgtgatccacagcccagagagtatcatgaacttcagaatgccagtcgctattatgaagaacttactaggagtatagttactactaaaaatcaattgcaccgcaacctccaatccactttcccacaaattgaagaaatactgtctcatccatctggcagaatttattgggcgcttgttagtcttttcccacatgctggatatgttctagaaaagaatgagacacaggtaactcaaatgcttaattctatttctggaataggacaacaaagggcacggtacttaaccacaagattatacgcttttgctagagaagcttatccttatgattccaaagatagtattatcgttagagctattcaaaggaacatttctaatttattttcactccagcaagaacgcgactatgtaattaactacatggaaaagctggctaaagcagtaaacgctcgtgctttatccatctatttgagtatcccaggggttgctagaattacagcagtgagattagtagcagagctcggtgatctaagacggtttagcacttcagctcaaattgatgcgtttgttggcattgatccaggaaggtaccaatctggtgaaaaagacagttctcttggcattaccaagcatggcaatcatattgccagaaaaatactttatcgagttattactcaaatggagacggtaaaggctacgcagccttgccatataactgattattatgacaagaaaaaacgatcttcaaatagacaaggctataagaaaatcgccattgcatcagtccataaactgatacgcacaatgtttgctcttatcaaacatgatcaattatatgattacaacatagccaccgaaaataaaagactttagctgaaatcaaataatcaacttaagtataagcaacctatggaaaaactacaagtattcataggcttatttgtggtactttcgctttttcttaaatttaaactcttatttgctttaaccttattcgcatcattaaaacaagtaaatttattttcttaaatcattgataatacttgactttgggtagaaaaacagctgtatatcctgtgtttctgaatatacttttttaggttcaatactttctaaatatcctggtttcacagaacatttatgagcacttccatcatcagcatacacatcaaatcgatcccctactacaatatcagtgtcattatttttggcaaatgtataaagtacttctaaacaatcttcttccaaccaatcatcaggatcacacaccaaaaagtaatcagaattaatactatttatagctaactctaacgctgaaccatagccaccattttctttatcaattactttaattctattatctttcgcagcacattctttcgcatacttactagaattatctggcgatccatcattaatagccaaaacttcaaaattactgtatgtctgattttctaatgactcaaaacatttttttacgtatttttcaacattatacattggaacaattacggttatgtctgatttcattattttattaccccaaataaattttcttcaacttttcagcagtatttctaatatcgtatccttgtttttttaaaaaatttgtattttctgctcgatcatacttcctggatagtaactttaaactttgcttataccactctttaagcgataaatttaagtcaagaaacatcacgttatcagtaaccttaatatctagaggaacattagtggaagctaataccggaagcccagcatcctgagcctcaatacttgcaattcctagtccttcatattcagaaggaaaaataaataaatccattgcttgtagataatcttcaacattatctacatttcctattaattgaacatatttctctaatcgattttgcttaatactcattcgtattgatttttcctgtggaccagctcctataagtaacagcttagccttagtattatttttaataaaataacttaataattttattaaaaatatttgatttttctcaggtgatagccttccaacatgcccaattagtatttcatgatctgaaatattcaatttgttacgataatgttctctagtcccaatattatatgcatactgctgtatgttaattccatttttcaaaattcttccttttttgttaaaaattttttttgaaaattgccaatatgcagctttttttgttggagcaaccaaaacgtcagcatatttactaaagattggtgcataaatctttttaattacttcatgctttacatttttattttttcctgacatgtgcgaatgcacaataacttttttcacacctgcttttttagcatacaaggtaaataatgcaagtatagatatacttccactatttatatgcacaacatcatattgattatctagcagaatttttttatatgcatttacaacattaaatctattctttccaacattaaaaggtaaattaaaagagtatagcgtagaatttagtgatttaataaagctaatatagtcgggattatcagcataatatggtgttaaaaaatcgaattttagaccttttttgttcatattttcaattgttctaaatacaaaagcctcttgcccgccatacaaaattggctcaccaaacgcctctaaaatctttttcatactatccaactttctacatttttattttatatactctatagacggattaaaacgtaatccctcaattgttcctttaaatatcatctttaaccttttacgtttattatttttagctttgaacaaaacccttatcatgtgatcatttaaacgtaaaaattcatatccatatccttttagcccttcctttctataaaagaaaaaatcattcctatacaaatatctatatctttctattctttctgggacatctgttgcaatgtttgcaccaacattagtttttgttttatgtacaacaatactattagttacaacataacattcatattttgaggaaattcgtcttgtatattcccaatcatcagtccaaataaagaattccttaattggtaaccctacttttttgataactgaaactggaacaaataaggaaacaaaagaagctaaagtaacaggtatcaattcagatgaaaaatcagacacattttttgttaatgtccttctctgaatattcatcgtacacaaggtattatcggtccacaaagttttactagacaaaaaaccataatcatgatttagttttatatctgccttaagaaactcattcaaagcatttttagttggtatgcaatcatcatccataatccaaacaaaatcataatccttttgagctaccatctttataccatactgaaatccaccagcaccaccaagatttttccccgtattaacatagtttatactgttatcatcaatatattttgcaatataattaactgtaccatctgtactattattatcaataatatatatatctggctttgcggtttgttccaataagcttttaatacattcttttagtaacttttttctattatatgttactacaatagcggcaacttgctgtttcctcataaactttaattctcctttttattcataaagctaactacagaaataaaacttaataaaaatggtactattagaaatctaaatggatcatacatattttgtgacattatactagttaatgcagtagtgcaagttagtaaaaacaaaaacttattttgaacaaatttgactttttttaagcttacatataatcccattacaaatggcgatataaaaatagcaaaacctattattccatattgaaataacatagataatatacctaaatctgattggtttaccatatgtgtatccaatatattaaaataattcccatcgtttgatataccatatccccaccatacacctctttctatccaaagagtttgatatgtatttaatgtcatcattcttatttgagtactagatccatagtctgcatttgaagttgaaaaagtattaaccaatttatttaagtaatttcctctaaaaataattggactaatggctatagctcctaccacatctagagctttacttttaaaagtatcactaacgataagtatgaataccactaaacttaataaataggctatttgttgtgaacgtgagtcatacacaatatatgcatataaaaagcataatactataactgagatattacgtgttttaattacaacacttttttctttgatgattttgaaaagagccataacccatacgtaattatctaaaaaagtacctggtaatctacttactccatttctcgcccaagcaaatcccattacttcaaaataacctggagctacattcatacgtaatttattgtacaaaaaccacgcgctaaatctaaatattaatatagcaacccccatataatatatattattaataaatttcattcttcgtttagcagtcgctagcacctccgtcatcggaaacgttaacaacatatacgcataatatctattatgaattaaagcatctttaattgtgtacccagataaggaaaaactatttagcctatataactgtagcccaaacataaaaataaaaacgcctatataaatagatacatatctgagactgtaaaatagtttgtgtaaggatgaatgattccttaaatttatttctttaaacattagaaaaaggagttcctttctcgtatgattggtttgaacaaaaaaacacatacagaaagaagaactccttcatgaatgattttaccaaagattttgctcaagctctattcaatccagacaaaataaatgatttattgcgcaaagagctacaacaggctgttaataacttgttagaagctgaattgaccgcctttctgggctatgatccctatgccagaaatggctggaatactggcaactctagaaatggtgcttatttccgcaaagttgatacgcaatttggcccaattgaagtgcaagtgccccgggatcgcaacggtcaatttcatcagcacacgctgcctgactacaagcagcactcggatatcttggaaagcatgattatcaagctttactccaagggcgtgaccaccagggaaatagccgatctaattgaaaagatgtatggcagccattacagtccagctcaggtatcaaatatttccaagcagatgattccaaaggttgaggcttaccacaaacgcaagctaagcgacaagtttttctgcgtctatttggatgcgacataccttcctttgcgccgagaaacgtttgagcgtgaagcagtctatattgccattggcattaaacctaatggacataaggaagtcattgactactgcattgctcctagtgagaacattgaagtctggacagagatgcttcaaaacatgaagtccagaggcttgaagcaagttgaactctttctttctgatggtgttgttggcatgaaaacagccttggccaggacttatcctaaagctcattttcaacgctgtttggttcatgtcatgcgcaatatctgcgctaaagtacgcgtcgacgatcgtgaaaagatcatgaacgaattcaaacaggtgcatcaacagacaaacaaagaagaagccacagctgtcctgcatgacttctataccaaatggggcaaggtttacagccatgttatcagaagcttgaaagacatagaaccagatctgctggtcttttataactatcccaagcagatcagagcttcaatttattcgactaacatgattgaatcatttaacaatgtgatcaagcgcaaagctaagcctaaggcagagtttccaactgaacagtcgcttgatgcttttattggtattcaggcaatgagctacaatgaccgttatttcaatcgaattcataaaggctttggtcaggttcaggacaccttagaatcctactttgattaaataaataattaaaaaatcaatttacgagaaagaactatttacacaaaagatttgacagtttcacatatcttgaaacttttatttctctatttttttgatttacataaataaaatacagtaaaacagatataacaacacctatactaatacttaaagaatttaagtctttaaaaaagttgataaaacctaaatataaaaaaactataaggtaaattgaatattcatacagttttactgttttccatctcatattttttctcataccaaattaaaaatgtgttttcgtttttatacctatttttcgtttaattaaagaaaagcctttctttaaagtattctttccaccaatttgtccccaaggaacttctacataagtaaatgaattggtaccaagccaaacatccattaacaactcagaaatatatccaaatactctcgcttcttgcacagaatattcagaaatattaatgctattttctagcttacttagaacatcaaacatgaagctacaatatgattcaaatgcattccttttcataataaacatattaaacatatgagccccacgctttttcataactttatcaaaagcaggaagataatttggatatacttcagcaattacctttcttgcttcatccaaaggctctttatgatgtgcatgaatgtaatgtgaataattagtttcaatataataatttctttttttaggtaaaattacatcatatttttgtaaaagctgatttactttctcaatactaattacattatctaaagaatatggtcttttctcaaagagtaatcttctatagtgaactaatccaatagcgtcaacatcttttaaattcttccaagcccaataaacagcagttagttcattgtaattaggatttttagaggatatattttcaccatcatcatcacgctgataggaaatacctggtttataattctttactgcgcctactaatactggtaaatatccttcctttttgggcataggaaactctttatgcgcagcaaccaaaatttctattttcaaagactcttctcctgatcaatacgctccattaggatgaataaccaccccaattgtcttaacaatcaacttcaaatcttcccacaaaccggaatggttgatatacacaatatcaagccaaaccatttcgtcaaagtcagcttcactacggcgtgttacctgccacaagccagtacaacctggcataacgagcaaacgttgcttatcgtagtcagtatactcagctacttcagagggtagagggggccgtggaccgactagtgacatatcgccgatcaagacattccacagttgtggcaattcatcaagactatacttgcgaattgtatgtccgatcttcgtaattcttggatcgtccttgatcttgaacattgcgccgtcaatttcgttctgatcttctagttcatcaagcatttgatcagcgttaacgaccattgaacggaacttccacatcttgaacggcttctcatctttaccgattcgttcttgagaataaaatgcaggaccaccatcttcatgtcttatttttattatcaaaaataaaaataacggagatagtaaaattaacccaagtgcgctagctagtatatcaaatatccccttaatcgtgtgatacactggtcgtccgttaacttttgcaggattaacttgtagtttatcatactcctcttaccctctgtttgatttagtctatttgaatacactctcttattaatcttatcacgtttaacgcaacttagaagcaaacttgcatatttgcaccaagcattaaaataaccagaactttttcttctgcttcaatgggtgccaatccatctgaactgggtcgccattgatgatacttctagcattatcttgccactgctgagctagatcttgactgaattcttgactcatctttttataagcttcactcaattgatactgccgtcttggcaagtcgtgtgcgtcgctagcaaaggtgcatccctgccccgtcgcaatcaacttacgcgacatctcttcgattttcttgccaaagattcctgtataagagctagcagtaatttgcaccaagcagccttgttccagcatcccttgcaaaatttccggttccttcaagatgcgactattgcgctctgggtgtacgataatcggcgtcaccccgcgctgcatgatcttgaagatcgtgtcttgcgcataagttggcacgtcctcacttggaaattccaacagcatataagtaccgtcttcatcgcagaacaggatatcatcgttatcaagcgcatcaattaagtcacccgacaagcgaacttcctgccctgggaaaaccgtcaacggcaccttggcctcatctagcttctgttggtagagatcagtcagccagacgatatcatccttatggttagtgtaacgaccattcagtgtatgcggcgtacaaattgcatgcgttacgccatctttgaccgcagccttggctaacttaattgaagtgtcccaattttttgagccatcatcaatgccaggcaagatgtggcagtgaatatcgactaaaaccattattgatcgtcactcttttttctaccgaacaggccctttttcttctcagcgccatatccataaccatagccatacccgtagccgtaaccatagccaccgttttcagctctaatgtcgttcatgacgtagcctagaatccgagctttggcaaattttaacatttgcactgctctagtaatcccagccttttgcgtaacgccttgacgtactactaagactacgccgtcaaggtgactagccaactcttgcgtatcggatacttcaagaacaggagctaagtcaatgataaccatatcataatgtgacttaaccaattcaatgaaggtttccattctgcgtgaaccaatcaattcagctgggtttggtggaatcggaccagaagtcaagattgacaagttatcaattccactttcttcaaccacatcatttaaattgattgcgtcagcttctgaagtaagaacagttgtcaaaccagtattgttcttaacgttgaacgtactgtgcaaagttggacgacgcaagtcggcatcgattagcaaggtcttgcgacctgcttgtgcataggtgatcgctacgttggccgtaacggttgacttaccttcactgatgttagctgaagtaaaagctaaggtactaatttcttcatcaactgccataaagttgatgttagtccggatagttctgaattgttcagataccgcactacgaggatcagcaactgtgattaatttggcaccatgcttaattgtatcgtcggtaccacgcttttttctaaataatgccatttacttctcctctcctatactcgacggcttctacgcttagggccattagaattcttattcttttttctaatgacaaatgatgatgacacatggaagtgtgaaacttgacctaagtcaactaaacctaagttatcagtcaagaatgcatcatccttaactgtagtgtcggacatttcacgaattaagactactgcgaaacttaaaaccaagccaataacaaagccagccaaggtaaagagtttcacattaggtgatgattgattaccatcagttgctggcgcaacgatcgtaacgttgttaatgttcatgatgttaggaatttgatctctgaatgaacgcgctacagcgttagcttcaacctttgccttttcaggtgtatctgcagtagcagaaattgagaagacctgtgattgttgttgagtattaactgaaacgctcttggctaattcgctagtagaaacgctgtaactcttaccgctacgttcaactacttctggttgagcctttcttactaatactcggcgaccctctgcattagtcttgtacttagcaggtttagcctttttaaccactctaactgggttagctaaacgattagaagcatcttgcaaaataacatgactagttacaatatccttataggtagtaaccatttgcatgttggcttgttgagtattatatgccgcattcgggtcattcttgttagccttttggttaaccaagatctgtgcattagaagtatactttggtgaaataataaaattagcgacgccccagccgactaaagccaaaccaacactccagataatcagtgcccagatgtggcgacggcaaatttgtagcaattgagtaagatcaattgtattttcagtttgcttttgctcttgttccatttaccttttcctttaataacgattaacgattcataatatagctagccttgttagcagctaccttaacatgtggcaattctagcgccgttctgatcttatcagaaactcgttgacgctcttctctacttaccacttcaatttccatagtgccaaacttagggttttgcgtttctttacttacaccctgagcatgatcttgagaaagattgttagtggcttttctataatccatagcaatcttgtacatttgattcatagtcaagtcagtctgcatctcgctagaaatggaattcaagaaacttgaattaagcaaagttgaaggtgaaacagacttcttaagcaaggccataattaccaagcggtcacgctcttgtctaccataatcctgacgagggtcaccatgacgaagttgggcaaatgctaaagcctttttaccattcatgtgataagtctggcctttgacaaagctataacccatattgttgaaagttaatggagaagttacatcaatccccccaacttggtcaattgccttcttcaaaccacccatattgatcatgatgtagccgtcaattggaacactgtaatatttatcaagtgtcttaatagtttcactaactccacccaatgtataagctgagttgatcttggttacaccatattgtgggtaatctgggaagattgcatttgagtcacgtggaattgaaacaatgcttgtactattagtcttagggttgattgacatcatcatgatggtatcagttctacccttccagtgacgacccatggcaccagtatctgtacccaataacaggatattaattggctttttctcattcagtaaattatcaagagtacgtcctttattactcttggtagtcttagcaacgggagtgtacatattctgcgtcgtatcacgcaaatttttgtagatcatcccgcaaacaaaaagaccgactacaatgatcacgccaataataatccaaaaaccgcgccagaacttacggtgacgacggtggtgatgatggcgatgacaatgtatcggtttattacttgattctgcgttattttccattctaatcctcttaatcttataatcgttattattatatactcaagaacccattttgaccacccttaaaaggtttacatgcggcaaatacttaaaaggaggctcgttttattgctgttttgggttgctgaaataatatattttggtagatgtctaacatgtaataaaaaatgcatccctcgaaaaatggaatgcattgctgctagattgagtttaaacggaattatttttcatcttactatcgccttgccttaaattgtactcacactgtaccatatttagtaagacctaaataaccaaaaagtattaagaagtacattaaatagaagttggatagcatgttaagtattgaagaatcaatcaaagaatttgaaacatattttcagggtaaaccaaatgaagttgaagtagtatcacgaactataaaacaaaaaagtagacggccacataaaccgcctactttatcctaattgttatgatgatcacttgagttagttaaatcatcatttttagttagatcatctatatttccaactactccaccaaatagtgtaaacacacctattccaccaaaaatactaccagccaccgaatgcctttgcatcaccaaaaaagcagaaatacaaatacatagaattgttactattgatactactatcagagatgtccatgcgagccaacctcttcttttttgactagcaacttctaatctccgtctatgcctactttcttcaacaccattattaaattatttccttagcagcattcggatacaatttttggtatccctcaagaatatcaggaagcggaattggtccactatgcatctcaagataagccattatttcttttttggtttctttaggcatctcagatttttgaatttgatcaagaatctattcatctagcgaatctttatctgactttttctttatatcattttctagctttttacttggcttttgatctgccataagatattattccctttcttaagtcgtcccctatcctttgccaatcactggcaatagctttttcctcagcattactattactagaatatatcaacttgtttaataatttgacataaggcatagctacatttttcgataattttttaaacactaattgaatatcggtaaacataattctcacctcattcataatctctttctttattaaaagtatacttaaaatttgactcgtggtaaagattattcttctacatgcgatccacttctttccttattataagcatctgtaatacaataaacttaacagcaaataacgaggtgtttttatgattgataatcaacctaaaaagacaaaagcttatatcgcgggcgtaaacttaaacgaccaaaacttcgactactacatgaccgagctggccaacttgactgaagccaacaacatggaagtagttgggcaaagctttcaaaatgcagaatcaattgtcgccggaacttacttcggtgtcggcaaaatcaatgaaattagaactatggctcaaggcttaaaagcaaaagttttagtccttaatgacaaattgactcccgtacaaattcgcaacttagaaaaattaaccaaaatgcgagttattgaccgcacggaattaattctggaaatttttgccagccgcgctcgaactaaacaagctaaattacaagtgcaactggcacgtttacaatatgaattgccgcgtctccatccctccgagaacaacttggaccagcagcgtggtggtggcttcgctaaccgtggtgccggtgaaagtaaactagaattgaaccggcggacaattggcaagcaaatttcggctatcaagaaggaattgaaggctgttgccggccaggaagaaatcaaagcggcacgacgcaaccaaagtcgcatccctaaagtcgctctcgttggctacaccaatgccggtaaatcaaccacaatgaacggactattgcgtgaattttctaaagaaggagccgacaaggaagtcttcgttaaaaacatgctttttgctacgctagatacttccgtgcggcggatcaacttgaaagacaactttagcttcattctgtctgacactgtcggtttcatttctaaactgccccacaacttggttgaatccttcaaggctaccctgcaagaaacgcgtgatgctgatttattaatcaacgttgttgacgcctctgacccgaacatggtccaaatgattcggacaacacagaacgttttggatgaaattggcgttaaggaaattccgatgattaccgcctacaacaaggctgataagactgatcgcaattacccacagatcgaaggcgacgacattctttattccgccatcgatccaaaatcgatcaaactactggccaacttgatcaccaagcgcgtttttgccaactataaaaagtttgacttgatcctgccactaagcgcaggcaaggaactggcttacctgcatgatcgcgcccaagttttacgtgaagactaccaagacgatggcgtccacatcgaagcgaacatcgcgcccgacgaccaaggacgctttcgtcaatatttggcctaactcgattaggaaaaaatatgaaaaaacataatctgctgttcctttttgccctcacatttttgttagttcctactaacacgcctgtaatggctgctaaatatagtgctagtgagtcaaaaaaggtgcgcacttttcaaaaaagctatcatcgtttgagccagaagaattacaatcagactacgctctttaccgtgcagccaaattttggtattcctttttcagcaggagtgcttgaccctgattacatcaaaacttcaatggcttatgtcaattattaccgctcattggttggactgcctgatgacgccaattatgctaatgataacgttaacgcacaacttggtgctgcagcgctagcttcagttaacgcggagcaaaatctgcgagcccatggtttacaaggttacgtcaagcctggctatatcagtgatactgactgggatacagcggaaaatactacattgggcaatatcaatttttcagaatcaactagcggaaccacggctggcgagatcgttaccgatctgatacgtgaagataataatattgcaggtaatggcaacatcggtcaccgcggcatgatcctctcgacgcgagccacccgaatgggaatcggcgcagcttatggcaccgaaaacaacgtcttgtattctgttgaacatggactatttgccgatgatattttgcgccagcctgtaaaaagccgaatcgtttatccagctgccggcgtttttccttacgaattagttggtggtaaaacgccatggtcttactcaacaaccgagcgaatttctggtcagccgaaaatttacatcacggatttgaccaccaagaaaaagcggcaagcgacgcaggtgcgcaacttcggcactgctctttatggtgacggctacacaacgacaatcacttaccgacctggcaaaaccaagttgatcagcacgcacaagtaccgtgtgcaaatcggcaaacattatagctacagtttcaaatttttcagacaaaatagcacattgaaaaataaacagattgtaaagcatcgaaaatgaaatacgttgatatgcaaaacggctcaagcagttgtacatcctgcttgagccgttttagatagtaacaaatattgtagtctgttcaacaatcttcatgtaaaataatactcaggtctattgcagcggttagctaccgctaagacttagtaattttagcatggctacacacccctcaagattttttaagttacggaggtggaagcatgcataattgggtagactggagaagtaggcttacaaatgattgcttgggctattgcgtatgcgataacaaaaaaagctaatcacaaggattagccgaaacaacagtcatcttaagttacgattggagttagcgaccgacactcgctagctccttttcttttattattttaatatgatttagaatttattgcaatgtttagaagtgcttattctacgccaatgacgtaacgcatgatgaatcaatagcttgttgtaccaagcataattgtgcttcatataattataggcggtggcaaagttatccaattgtcccgccgcgataaattgattgcgtgtccaatgccaatcctgagtaggataatacaaaattttcactcggattacccttcctactgtaataattgcccgatcatgatgataacgcgtgcgagcaacattgaggtagctaccaattaaagtattgcgccagtatcgattatgcagataatttttctcccaaagtaaggccttgcgcaataccttagaaatgcagtaccattcgcgtttgccgttaggcaattcaaccaaacaccaaagatattggtgtctcttcgccattcaatccaccccttctaattaatatcggctttaattataccgctactagctattcagttagaaaatcaataatgtcagaaaatattaggtcatgatgtcaaatctattcaactgacatcatttgtcctaagaacgcatttaccgcttgcttaatatactcgctgcaaaggtgagtatactgcgttgaatttctggacatggctctgcttaaacggtcttgatgggtgtcattttaatccttctttaatttttactataattttctccacactgaaaactatggcaaaaaaagtagaatttttcagtctagggaaaacttttatcaatacaaaaaagcaagcgcattaatcgcctgcctaaaagtattccaaattacttctctatagtactctcttagcaattgatggtgtaaagtaactcgataccgtttgcaaaatagtaccttgctctggtgttgctgcatttacatattgattgtttcctacataaattgcaacgtggtatggagctgtcgttgaaccccagaagactaagtcacctggctgcaagttgttcaatgaaacagtttgaccaaccttaacttgatcataagttgttcttggtaagttcacgccagccgctttttggtaaacatattgtactaagccagaacagtcaaatgaatccggaccttctgcaccccagacatagttcttacctatctgttgtttagctagcgcaacaattgaagcggccttactagtagcttgcgttgaagaagtttggttagtattttggctagtcttcttgattgccgtattaacaatttgcttagccttcttcaccttagctatcttttcagccttcttctgagtagccgttttagtagctactgccgctgtcttcttattaacagtagtctttgtctgcttagcttccgttttcttaacagttggtgcttgcgatacttctgctttttctccagcagtaacatctacggtataacgcgcttcaatccattcacgcgttccaaccttgtaccacaagttgcccttcttatcgagtgcagtctcagctacattccagaccgtgccgtccttagcacggtagcccatgaattgaccattctcatagttggtccaaatattcaggctcttacctggtaaatagctaatcttaacttgcttaatcgcagtaaaattagctgcacgaacagttttcattgatgtgattgcggaaacacccgtaacggtcagggctgcagccgctcccactttaaaaaaattatgtttcataattgaatccccttggtagcgaaacaggtgaaaacttttcacctaaaattacccactcttactatgtaacgccttcattattgcatgtcctacctcaagaagcaaattagaacattacaatattacaaaaaagacggatcactggaatccgtcttcattacttactatcttaatttaaaacacgcttagcaacacttgggtagaagtatgaactcaaagtttgcttgattacgccttgacctggtgtagcagcgtggatgtattggttgttaccaacatagatacctacgtgatatggagcacttgcactaccccagaaaagcaaatcacccggttgaagattatccatagaaacggttgatccttgcttaacttgatcataagtagttctacccaacttcacgccagcagcgttagagtaaacatattgtaccaaacctgaacagtcaaaaccgttagttcctgtaccaccccaaacataggacttgcctaattgtgctgaagccaaagtaataactgctgaagcatcaccagttgcttgaactgacttcttagcctttttagctttcttaactgcttgagccttatctgaactagcatcaacagtatattgagctaaaatccattggttatcaccaatttggtaccatgtacggcccttcttatcagtcttggtgtcaaaaacattccaagtagtaccatgttgagcacgttgaccagtaaagtggccaccattgtagttgtcccatatgttaattccataacctgcaatgtagttaatctttactttggtagtagcagcttgaacagtagcattagttgaatctggcttgatgacatttactgcagctacaccggtcagagttaatgcagcagctgcggtaacttttacgaaattgctcttaatattcatcaaattctcctgtatgttttcactatatctataagcattcttagaatttattacttaagctggtaacgaaaatattaattcatcgaaaaatctttaaatttctttaatgtatttaacaaaatctataataatgccccaatgttacagtagtgttacaaaagtaatactgatttaataaatattacgtttccgtcaaaaagaaaaatagctagggagatttccctaactatcttaactagatatcttatttttaggaagactaacgcaattagtcgattacacgcttagctgatgatgggtaaaatgaagctaaggtttgttgcttaacattttgaccaggagctggagcgtgaacaaacttaccgttacctacgtagatacctacatggtagttaccccagaataataagtcacccttcttaagcttcttagttgaaactgaaatggtcttaccaagagtaatttgaccgtaagtagttcttggcaaaattttgttaattgcattcttgtaaacgtagctagttaaacctgagcagtcaaaaccgctaggacctgcagcaccgtaaatgtaaggcttgccgatttgcttcttaacaagcttaacaaccgcattacgctccttagtagtagctgattccttcttaactgaacttgaatcaggattggtagtttcaagatctgaaattgagttgttagtattgatagtagtgcttgaaacatcatcagcgtgaacagctggaacattgatcattgaaataccggcaaagaatactgataaagctgcggtgtattttactaaagtacgtctaaaattcaaaattaattgtctcctctaaaaattactaaatttgtttttgatttcttaaatcagttgacggtttatataataccgactgaatgttacacgaatgtttcaaaagagctaccatcgcgttaagaaacatgttaaaaaaacagattttatgtaaaaaaaggagaagcaaaatgctagcgaagctttgctacaagggcatcgagcgcgtttttagtttctgttaaattgtcgttaactaagatatgagcgtattgcttcaaatcttcaggtaaagcatttaattcactgccgctaagtctttctttaatcttggatggatcatcgccccgctttaaaaggcgctgttttaactcttctttagtagaagttgtaacataaagaaaataagccttgtcacctagctgtttaatgtaggaataaatgcccttgatatcgacaattaatgaaaccagatcactttttttccaggccagattcaaagcttctcgacttgagccatattgataagagccgtacttaatatgctcaaaaaagtgcagctgggcaaaagtttcatcggtttcaaaatgataagaaacattctgctcctcgcctgatcgcatcggccgcgtggtatgcgttaatacgcgtggaataccatatttttcagttaaatattctgaaacagtcgtcttgccagcaccactaggtcctgcaataagaattatttttttcaaaacctgattctccccacttgaaaatgttgcttttttataatagcattcttgtgttataaaagactaagactttttctcggaaggaagatacacataatgaaaaaagcagacgtaaaagttggtgcaatcgttggtgccaagtcagaagaagaacttaagaagccattccaaggcaaagttgaaaagatctacgaaaattccgcattgcttgcaattacttcatacgatcccgttgacaccactgctatcagcgacttgaacaataagatcgtagttaacttcaagaatttaaagactgctcgcgctgccaagaacagcaagactgcttcaactaatgaagttaagattgaaaaaattgccaagaagaacgacgataaaaaagaagcagacaagaagtaaaatttgacaaaaatagcccgcgcaatgtttacgcgagctatttttttgcctaaaattaggacatcgatacgagaggaaatattttatgaaagaaaaaacgcgaactgttttattttggtttattttaatccagccctttttagacctttattggttctacaacggtaaattagcggaagttttaccatttactctacctacgattatccgaattttagctgtttttgtgattttctgtatgtttttcagtcaaaagcaaaattggcaaaaattagggcaagacaagtggttaattctatatttagccctactaattttgtattcgattattcacttaatccacgtcaaaaactttaacagcattaatcctaatgactacaattattcaaccgtaagcgaaattttttatctcattagaatgcttttacctctgatggtgatcttttttacaaaagaattgaatttcagtcaggagcaattcagacacgttatcgaaggcatcagcggacttttttcatttacaattgtcattaccaatctttttgtcatttcgcttagaagctacgagacaggcccgattagcgctaatatttttgaatggtttgttaaccccaatatcggttactcccatatggcctccaaaggcttcttcaattttgccaacatggtatcagccgtactctttatgctggtgcctctgatgctttacttcatgttcagtcgttttaactggaaaatcgtcactttgaacgtagttcaagctttagcgatgatcgagttaggaaccaaagtggccctcatcggtttaatcggtggcgtgattatcagtattttgctgtatgttttccacttatttattgttaaggatgttaacaaaaacggcaaagccattatcgtggcgcttttaatcgaagcgggcacctttgccatcatcccctttggtccagcaatccagcgctataattatgaaaaatatttggctcagcaatccgatgattctttgacacaggccaagcgagaattaaatgctggcttaaaaaaatatcctcaaggtaaacagcgcaaggaatttttaacgaatttcatcggcaatcattatcaagattacgccttaaataagaagtttgtttttaaaagctacccttataaatacgatcctgaattttggctcaaaatcatgaacgagccaggcaccgctagaatgcaaaatcgacatgtagaaaaagcgatgcttgatcaagttgtgaagactaacaataatcgactcgacaagttcctgggcatttcttacacacgagaaaccaacattttcaaccttgaacgtgatttcactagtcaaatttattcacttggttggatcggcatgctgttgttcattgggccttatgtcattatcctgctctacgctttaattaagtggctaatgaacaaagaaaagcggacttatttgatcagctcaatgttgctttcaatcgcctttatgattttcgcagcattctcgtcaggtaacgtaatggacttcttaacagctagcttcatcctggctttcgttgaaggcagcttgttagctagcgtaaccagaaaagaaaattaaacataaaaaaagttaggtagttgcttgcctaactttttcttagtttttaaacattatttttcttgcttaataaagcttgaatctggcacccgaattaagtagtaccgagttgctaaatgacctgcatgcatcccgattccattttgccaattccgcttgtacttagccgtataaattgccacgtaagcacgttgatactttttatccattttagccaattccttttttacataaggaatcttctccgcattcacgtcaagcgcagtgttaccataagcaatcgaagcatagtcactaccaatcgtgaccttgctgccatcgcgataaaaagtataagtttgtgagccatatctcttcttagcagaattaatcgttacatagcttgaatttcccgcacctgtacgcattatcagtggctcatacttcacgcttgaagtaatgcggtttgcatcttccaggtctggattgtccataaaagtctgattaaacatccaacctgcagctaataaaagtactacaatttccacaatattaagagccatattcggccaactaaagcgtttatgctgtttgataatcatcttaatccgtctttgacggatgttctggacgatgaaaactaaataaagaatgatggcaacccaaatcaggatcccaatgatattccagctgaacatatctcgccctgctatataaaacatagaaacatgcagaagttttcatatttctacatgtcagaaagaaatatattttcctttctttgtcttatttactgctgtcttcatcagtattccgatattccatctggggagtaatcgcattgactaactcttgcagcttaagggcttagccagcccattgtttttattttgttaacgctagtaaatttaatactgcattgtcatcacgatcattgctatagccacattcataacaaatgtattcattatgcttggtgccatgttttttattgccctgcagagtaattttgtctgcaccagttttgacatagccacaattggcacatctttgtgttgatggatatgttttatcagctagaattaattctttgccataccattcacacttgtaagtcaagacttgtctaaacttgccaaatagtgacctttgcatgcctttggaggctacatgggtcatcatcatttgtttgacattcaagtcttcaatgacgatttggtcataattgtttacatgctcagtggtaaatttttgcaaaagatcattctgaatattggctgctttgcgataatcacgctgaagcttggttctcacttgcaggtaattattgctttggcttgccgatttaccgttaactcttctctttttagacaatactctttgataatgcttgattcgcttgtacagtttctgtagttttgctggcaaaacattaatcttgccttcagtgtagttgaaatgcccaacgttgacatcgatggcggtctttttgccagttttagcctttagtccagcctcttcttcataggaaagggcagcgtaataatgtcctctttctctaaagatgctggcaattttaacctcttccatctttaatgcctcgtatgctggaatatcaaaccaagatttaatccctctaggcttatctaatctaagcttgccattaattatcttggcgcgatcagttttaaagccttgacgtggagctttcttagatttgaaatgcggcttgccccaatcaggctgggtcttgtcaaagaagttcttccaagcattagccagatccttgactgctaattgcagacagcgagcagacaaagcaaattgccaatcagccttgttattgactaattcatcccacactcgatgctcattaggactaggattattatccttgtctaaagtccaagcttcatacatgtcttgccaggttgctaaagctagattccagcagtatctgcgatagttacaaagacgttcaagttctctttgcattatcttatttggccttaattcgactacctgagttttgatcatttgtttcacctccaatgcaaacataagtttagcaaaggatgtaacaaaaacaagcgaacaaaatattaaatttttagcagcagttaatttgcttctatgttttgcctttctgaacaaattacctgtatctttttctatattgccattaaattctatatttcagctaaccatttaatcctcctttttttcaattatatggtaaaaaaagcaaaatttgaataggataataattgaatacttagttaaatagtgagaagatcttactagtacattagatttattagggaacattatggtagcaatagctttttattcaattactgggcaaacggaacgttttattaagaaaactcaactttcggcccatcaaatcgacgatgccaaccctaagtatgatatgggaaaatcttatatcttaatcgtaccctcatatcaggacttcatgatggattcagtcgttgattttttaacgtataaagataacaaaaaaaatattatagggattatcggttgtggcaaccgaaactttaacgacctctttgctcaaactgccaaaaagatcacggcaacattgaaagtgcctattttgtatcttttggaatttagtggtactaaccaagatgtcaaaaatgtacgaaaaatcgtacacgatctttctgctggtgagagtactaagcaagtccaaaagcctaaggaattacgtgggaatatcagctttttgagtgattttagagattaaatatgactgaaaaatattacaaagcaattaactggaatgacatggaggaccgggttgacaaatctgcttggtcccgcctgaatgatattatctgggaaccccgtaatgttccagttagagaagataaaaaagaatttttacaattagacaagccggtgcaagatgccttgcttcacgcattcggagcactatctttttcatctggactccaaatgaaaaatgggctagagcaaattaaggtagatgccatcacaccagaggaagcagctgtgctgaatgccttgcaatatttggaatctattgccaataaaggctacagctacgttatcaacgagttgacggactcaaatatagcaaaagacgttattaactgggctgatgacaatccttacctgcaaaagaagattcggattttgaataaaatctaccaaggcggggatgcactacaaaagaaggtagctaacgttatcctagagacagctctctatcattctgccttctacgctccgctttatttattcggacaaggcaaaatggtacgaacagctgaaattgttaagttagctttacgtggcacttcatttagtgggatttatcctggttacaagttccgcttaggctaccaaaaattaggtaaaactgagcaagcagagctaaaagaatggatcgataacttgtacgatgtgctaattgataatgagaagaagcacattgagttaatgtacaagggcactgactggatcgatgatgttacgcactatctctactacagtgtcaacaaggcctacctcaacctaggtttttcagccaagtatcctgacacttctgattcaatcaaccctattattgaaaaaggggtcatcaagaatgcagtgcttgaagacttcttcttctacactaacgatcactcgctgactaagtttaaagaaattaaataattacaaaagacgcaatcgaaaattcggttgcgtctttttttacttcttagtagttttcttggttgcctttttagtagcggttttcttttctgcttcctttttttcaggcttcttatattcacgtattgtggttagcttttcaataattgcctccaccagttgatcaacaatcttcgctggatcttgttcgatctctacttcactggctaattgatcaattctaaagcctgaaacattaacgtattcagagcgcgtttcaaagtaaacatttaaaggatattccttaccctcttcaaagaagttagcaactcgtttgtaattgctataaggcaaattgataatatttgtctccaaggcaaaagtagccggccgctgacccgtcactgctagttgcgtttggatcaatgaattatgcttaaaagcagcgataacttccttgaccatcttttcagcatacggcttgattttgctcttcgacttgctaatgtcggcatatttaactgtttcaagatcttgaatataatcttgattttcaattttttcgttgagatcttttaaattaatttccaaaataaactttcctttttcattggttataattacaaaatactacaaaaaaattttttgtcatcctttttaaggattcaattcagtatttttagctttttatttgttaaaatgacactatgaaaaagcaaaaatttgatcttaagtatttatttttactcattcccattacgttaattctcattataggattgatttacctttttaacaaaaataaaatcgataatgaaattaattggatgacaatgaaggaagaacagcggctcaatgtcccgctagaaaatcaactgcccgatctacccaacggctgcgaggttactagcctatcaatgttactgaattactatgacattaaggttaacaaatatgatctcgccgataatattgctcatgttgattctttcaccgacaacggtaaatatcgcggcaaccccaatcaaggctttgtcggccatatgtctgtcgctaatgctggctggtgcgtttatcatgggcctttatttgacgttgcacgtaaatataccagccacatagaagatgcctctggcagcaattttttagcgattctcaagttaatctccgatgggcatcccgtgctgatcattaccacaaccacttttaatcatgttaacaatatgcaaacatgggaaaccaatactggtaaagtcaacgttacaccgtcatcacatgcctgcgtgatcacgggatacaacaagcaaaagaagcttgtctatgttaataatccttacggtattaaaaaccaaccggttaattggcataacttagaattgagttatgaccaacaaggacgccaggcactttacatcaaataacaaaaaagtgtctgggaaaaaaatagcttccagatgaataaaaacgatcaagatttccttttttaagaatcttgatcgtttttttgttctctttaaaatttttaacaataaaaatcggcccttcagccaccttctttgacaatatttgttcaaattcatcatcataaaggcaattccgatatcggtttcgaccttctctttacctcgcaggtgcgttctgcgcatgccaaatacgttcttcaaatgtccgaaaactggctctacatcatattttctcatgccatagatgtgtctgccttcttcgctttggagaacttcttttgctttttcttttaaatattgccagttaggattatagcgaacttggcgctggcggccgctagctgttttagccaattgttccaattctggcgttagctggaactcgtctgcctcataaaccttaaaatcacggacctgaccagtagaacgatccttgcgctggctgtaatatttgaaattgaatctgacgccatgatgatcaatgtaataatcatctttttcattgtagtaccagttgattagcttagttggatcattcttatactttttggtctgttctttttcatacatagtgtagggaataaagtacttcttgtctggatatttttcctccagcatcgaataattgtattcactgccatagccagcatcggcgacgattttgtcaaacttgtccaacacggtcatttgatccaaaaccggctccaaagttttgaaatctgtcggattaggaaagatggcataatcaactacatattgatcggtcgtgactgcttgaatattgtagccaggctttaattgaccatttttcatgtggtcttccttcatatgcataaaggtggcgtcatgatctgttttggaataactgttgcgtccggcaaagatctcttcggcttcttcatatttttgcattcttggcacataatcttttcttagccggtgcagaatcttttttagtccacgtcgcttggcttttcgaggtgaaccgccaggaatggctttgttttcctgctcaatctctttagtcagcttgttaatttctgcttcagtttcttgagctaattcctttagcccctgactagtttgaactttttctttttccatttctttgactacttctttagtaatcaattcatcataaagttcaactgcctggcctttcagcttttcatgatacttttcaaccgctttgcgccagacaaatgtatagcggttagcatcagcttcaatcttagtaccatcgataaaagcagcaccttcattgattaagccttcatcttctaacaggttagtgaagtagataaagctctttttaatcagttcattggcatggctgcttgatctaaaattattgatagtatgatatgaaatcttttgctggtcagccaagatcatcattggcagattttcttccagcatcaactcaatctttctgccagaaaaaactcttctggagtaagcaaaaagcagtattttgagcatcatggctggatgataggctgggcggcccgttttagcagtcttgcctactaaaacatcttctggaattgaatctacaaaccagctgatgacattagccaaatgattggccggaatggcaaaatctagattaagtgttaaagcagtttgacctgtgatataattcttgtacatgttagtttccaccttttttattttgtgatgatttaataatatcaaggctggagctaaaagtatacaaaaagagcgttgaaacaaaaattcaacgttcttttttcatgatctgagacttagttttttcccagacacttttaactcaaggcacatgctcaaagcatatgtggacgtttaaactgttcacatcagtgcgtccaacatcagcacttcccgtgcttgccacttaaggcggatgtcctctatctcataaatatacgcatctcgcgttcattaatcgactcgtcagtcagtaattgtactattttttatgtttgatgtacagtctagcacttttaaaatgacgatatttaaatttataaaaaacttcagtacacatagtcgataacatgaaacctaaagcaatagcaccagtaacaattgctactcgtagaagcaaattctctccttgactataatcccccacaactaaagcacgtactgcttgataagcaggcacgcccgggactaacggtactaaggcaggaatattaaagaccgtcactggactttttttaatgcgtgcaaaacacaagcccaaaatacctatcaaaaaggcgccaattaaatttgaaatcattcgcccaaatcccaaattaaagcaagtccaatatgccatccagcccactgtgccactgactcctgacaggtgaagatcgcgatgcggtacattaatagttaatgcaaaacccaccgaagctacataagaaaaaatgacattaataataatttctaaccaaagtggcatttttatactcctatgaatttaagtacaagtgcaactccaccgcctaaagctaaagcggttaacacagcctcgcacattcgcataatccctgataataaatctcccatgaatagatctcgcaaagcattagtaattgccaagcctgggactaaagtcatcagagcgccgatcaaaatattatcagtaatcatttgtggattaaaatgattgaataatactgccaagatccccatgaccattgctgcaattagctctgataaaaaacgaatcttagtatattttttaaactcataatacgaccaaaaaccaacagcccctactaaggcagcacctgggaaatcaacccagtcgtaattatccataaacaaaaccatcaaggtagcagacaatacagcagctcccaatacctggagccacattgggaaagtaggtgcttgtgatactaaagcaatcttttcttttaattcagaaagagtgatttttttaactgcaaattggcgcgacaagtcattaacccggtctactaattccaaattgatgttgcgatcacgaatttgtttcatctgacttagcttgccaccatctaagctcatgaaaacacaggttggcgtcgcaaaaacacgcggatcatcaattccggcattgcgagcaattctgagcattgtatcttctacccgatacatttcgctcccgccttcgatcattagtcggcccgcagttaaacaaatatccattacttcttgataaaattggacatcccgcttctcagacatagttttagcctcagttcatagtttcaatatcgatggtcttgtcgacccaatcaccgcggaaaaagtcacgttcgtgactaacaataatgactccgcctgggaagttaacaatcgcttttctcaaagcatccttggtatcgttatccaagtgattagtaggttcatcaaggaaaagcaaattagctggttcaaactgcatcttagctaattttactttttcctgttccccaccagaaagttcctttagtggactcattgcttgttgtgcagttaagcccatgcgtgccagcgcttgtcgcaattcctttggctttttgcgttcaaattcttcttgtaaatattggagtggagtcatgttgctattaggccaggttagatcttgcttgaagtaagccaactttgcagtaacagataactcatatgaaccataaattggctttaattgccctaacaatgtcttaagcaaggtagtcttaccaattccgttaaaaccagtaatcgccactttttcatccccaccaacagagaaattgaaggctgacttgaccaaagcatggtcgtaaccgatgaccaaatcttgcgtctgtagcaacaaattagaagcagtcgcaacatatggaaattcaaagcgtgccttgcggttgttttttggcggtgtcaaaacatccatccgcgccagctgcttttcccgtgacttagcactcttagcacgtgtacccgccttgttcttgcgaatataggcctcagtcttagcaatcttgcgttgctggttagcataagccttcaagtaggtctcacggttggctgctttttgccgcaaggcttgcttcaacgttcctgtataacgagtaattgtgccaaaatcgatatcgataatgcagttagtgattcggcccaaaaagtcataatcatgactaacgacaataaaggctccagcaaaattgttcaaatagtcaaccagccaatcaatatgtgaaacatcaagatagttagtcggttcgtctaaaaccagaacatctgggctttgcaacaacaactttgctaaaattattttagagcgctgaccaccagataacttagaaacatcgtgatcatagcctaaatcagctagtcctagtcctgaggcgacttgttcaatttcagtatcaatatcataaaaattattttcttctaaataagtctgtaccttgccggctttttctaacagggcttcgtccccgttttcggcatatttggcatacagatcattcaactctttttctttttgaaataattgatcaaaagccgtccgcaaaaagccacggatagtcacaccaggtgccaatttagcatactggtccaaataaccaacatcaattttattttgccaagttacttgaccatcatcgggcaaaatttcacccgttaaaatcttgattaacgttgacttgccaacaccattttgaccagtaacccccatatggtcttctttgttaagcacaaaattggcatcttcatataaagttttatcaataaaactctgacttaaatctttaacagttaataaactcatttttcatcccctattatttagctgattcatgttctttttcataattttggagtgcatcaagaacacgaggccaatagcgcttaggtaagatcagttgcaaacgatcatgataaataggaaaatcacttgcttttagccccgtaatcttagctagctcctgatctgtcagcttatatttataaacaatacgcttaatttcgactgatgcatgtcctctaaaataggataggccgaagaaaaagatagcaaaaacacttgctgtgatgattgctaattgcaaattcatcctgaagctgtgtagacaaataaaaatcacggcaataaaagaaatcacagctgagagtacaccgtaaataactggaaatattgattctttttcttccttttgcataatcttttcctccctaattgagacttagtaactttacgaacttagcagaaatcagccaaatttgcaagattctacgttttcactgatttttttacataagttaagtatacttagcataattaaaattgcacggagaaaaaaggaaaatgaaacaagaaaaacattattatttcacaccaattcatttgcaaattaatgacttagacgtgcaactagttttgccacaagtcgagcaagcagcagaattatatcaagctgttgcctgtgaccgtgaaaatttaggtaagtggctgccgtgggcctacaaaatgaaaagtgcacacgatgaagctaattttattaaacaaattcaagccaaaatgaaacggcagtcaatactcgttttaacaattttagtcaataagcagccaagtggcatgatcgacctgcataatttgattccaaataaaaaagccgagatcggctattggctgtcgagtaaatatcaagggcatggtattgtcacgaagagcgtaacggcgttatgccagcatgcttttagtgagtttaacctacactatattgatctgctagttgctgtcggcaatgacaaaagtgcaaatgtggctaagcgttgtggttttaaattgatgggaattgaaccacagctaattaatgggcctgacggacaaatttttcgtttgattcgagggtaaatatattgtgttcgcttgttatcaaagctaatattagataaaatatttaaacaagtgtttgagcataacactttactataaaaatgaactcaaatataataaaagtgtaaggtgatatgcatcaatgagtagtcggctcatggtcaatctgattctaatgcaggacataagggcctgacgggtagcagggaccaaaattaaacctgatattacatatctaagacgcaatggcttagttggtggcagacaccaaaattaaaccgactttaggagttcacaatttgtggactccttttttacttggaggaaaagagatgaactataaattatttaaatcagttaatttaaaagaattggggcaattacgtcggtacatatccattatttataatagtgctgatttttatgataaacattttgtaaataaaaccatcatttacactactaaaaataataaaattgaactcactgcaagaagagataactttatgcatttatgtggaatttcatatatcgaagggccaagaaaattttttaatgatgctctagatcgaaaagtacagctaaaaaagttcttattaaaaaagatggctctacttttcagaaattacaagttttaaatcaacttaaagaaatgttaggtccacacttaagattaacaggacgtggagcctttacatacctaaaattcgatcattctttacgtacaaataaaacgatcttggctcttgcattattaaataatcaaaattatatggttccaatctctttgctaaatttgaaattcatccatccatttcctaaaggagataagattattaaaatagaatctaaagatctaaatactggtaagattattactcttagatgattcgcagctaaaaccacccagtcaaatctttaataatgaaaaagataaccggcaccaataatgatggcaagaaattcagagtcttaacatcacgaatttttaataaagacaaaccggagcaagcaatcaaaaagccaccaacaatagacaattcagtaactaatggacctgtaaaaaaatcagccgacaaaaattttgctaccaagtaaatgctaccttgccagcaaaataaaaccggaacgaccgctagcatcccccaaccaaagctagcgccaaagaccatcgaagttactaaatccagcatggcattggtaaatagcatagtattgtttcccttaactgccgccatcacgggacccacgattgacaaagcaccaatacagcaaagcaaaatctcagtagctagacctttagctaaattagatttgcctgctttatcaactaagtgattaaaacgaccagcgatattgagcgcggtaccgactactccacctaaagccaagctaacaatgaacaaaactggatagtgacttttaggcatgctgttagtcacattctcccaaccgatgcctaacgctgccagtcccattgcgatgaacaaaacgtcttcataacgcttattcaatcctttctttaccaagcagccaactgtagtaccaaccagcaaagcgcaagtatttacaattgttccgatcatttttctcacctcttagttttattttaccgcagaaaaaaagtatccatctcggatactttttcatatttaccatttaaaatgccaactactactcgatgacgctgaagaactagatgaagatgtgctttcacccgtacctgaaccataaccagaattcgaaccacctgccggcttatcttgattttgatcataaatccgataattggtgaaagcattgggatcatcccacttgatgtgattgttctgatcattcaattcattttgccgcgtttcttcattgttcaaagtttgtgtttgcaaattcaggttcttacgaattttatctgacgtcttttgtagttccttagtagacgccacctgaattgaagaaccatcaatccaagcatcatgcccttgaatgtagccactctttaagctattcatgcagccacgataattgagcgccaaactaagcatatcattgaatgtcagattagttttcacatatttattgaaaatatctaccagcttgcggtaattgccaagcgtattaaccgacattgccttatgtgcaattgcctcaatcacctgacgttgccgcatctgacgaccatagtcaccacgtgggtcttcttttctcattcgaacataagccaccgcgtgccgtccatttaaatgctgcttgcctttgtggaaatcacaccagtcatacgagaagtcaaatggaacttggacatcgacaccaccaactgcgttaaccaggctttttagcgccttcatattaacttctagataataatcaattggcacatttaacattgatgacacagtcttcatacttgattcatgtccaccgatttcataagcagaatttacccgaaacatgaagtatttattttctggatcgcccttaatatctgccaaagtatcacgtggaattgaagtcattgtcgcagaattcttttgtggattagctgttgctaaaatcatagtatcggaattaccacgatcatggcgaccttcaatcccctggtcaacccctagaactaggatagaaattggctgtttattggcaattttagctgaagtagcagtgttgccgccgtttttaccatcaatcacactatggacggtaaaatacatgtgagcagcccatgccatgccaaaacaagcagttaataatactgccacaccaatcaagcgggcaaaaaagttacctgatttgagcgctgatgcatctgcggctaaagcacgattccgatgaagattaagcgatgaacgatgagcgcgataaccttctcttcgttttggattttggtccattcttttgatcgtttcccttcgaatttaatacaagttagtttatttgtatcacttttaatctctcgataaaataaaaatgctaataattaataataacttatttttttgcgaaatataacgcaacaagctaagatgtatagaaaatgaaatattatggaggtaaaaatggcaattccaactagaaacgaagtccctgaagagcttaaatgggacttaacccgtatttttaaaaatgacgatgaatgggagcaagcttatgcagctgcacaagaaaaagtggctaaacttgctgaattaaaaggtacactagctaaatcaggcaagaacctgtacgagagcttaaccaaaatcttagctgttaaacgtgatgtggaaaatatctacgtttacgctaccatgtccagcgatgttgatacttctaattcgcactatctcggctacgtcagccgggtacaaagtttggctaaccagtttgaggctgcaacaagttttattaatcctgaaatcttgagtatccctagtgataagcttgagcaatttaagcaagctgaacctagattaaaggattacgcacactatcttgaaacaattactaacaagcgtcctcatacattacctgctgagcaagaaaaattgatcgccgatgctggggatgctttaagtgtttctgaaaatacctttaacgttttgaccaactccgacatggaatacggttacgttcaagacgatgacggcaatatggaacaattatcagatggcctttattctttgctgatccaatcccaaaatcgtgatgtcagaaaaggtgcttttgatacactttatgccacttatggacagttccaaaattccttggcttcaactttgtctggcgttgtaaaaaagcacaactataacgcacgtgtgcacaagtataattcagctcgtgaagctgctttagccgataatggcgtacccgtagcagtttatgacactttaatccaggaagttgattcacacctagacttacttcaccgttatgttgcgctacgtaaaaagatcttaggcctgaaggatctgcaaatgtgggacatgtatgtgccactaaccggaagaccttctctttcatacaatttcgaagaagcaaaagagacagcaaaaaaggctttggctccacttggtgaagactacttgaagcatgttgactatatttttaataatcgtgtcatcgacccaatagaatctaaaaacaaggtaactggtgcctactccggtggtgcttatgataccgatccttatgagttgctcaactgggaagataacatcgattcactttatactttagtccacgaaactggtcactccgttcactcctggtacactcgcaatactcaaccttacgtttacggcgactatccaatctttgtggctgaaattgcttcaactactaatgaaaatattttgaccgaatatttcttagaccacattaccgatcctaagacgcgggcctttatcttaaattactaccttgattcatttaaaggcactttattccgtcaaactcaatttgccgtgtttgaacaattcttgcacgaagccgatgctaagggagaaccactgaccgctgacactttagacgacgtttacggtcaaattaatcagcattattacggcgatagcgttgaaccaggcggcgatattgcccttgaatggtcacgaattccacacttctactacaatttctatgtgtaccaatatgcgactggctttgcggctgcaacggcattagcaaacaaggtggttcatggaacgcctgctgagagggatgcctaccttggtttccttaaagctggttcaagtgattacccaactgagatcatgaagcgtgctggcgtagacatgactaagcctgactacttagaagatgccttcaagacttttgaaaaacggttgaacgaatttgaaagcttgattgagaaataaataatcgcgctcatataaaaataatcgatatcatttcgtgagatttgatatcgattttttgttgatgatcttgatttattacttggcatatttatcgctcaatatgtataatacgtatataagtattatagtgccagaaaaggtgaaaaatatggctgaaactttatataaaaaggtcgttaaaaatggttcttccttagctatcaatatcccagctaaggaagtaaaagagcaaaatctcaaagtaggcgatattgttgaagtaaaaatcaaaaaatcagaccgtcctaattctgaaaatttaaaagaaatagatggcttaatttctgattactgggatatgttagagtacttaaaggataagtagtcaatgaagatcaattatctaacagaaaaggatattttagtaatcaatgcaagggttattcaaagagaaggtgcaacgggacaaaaacctcacgttagggatgcagaagcccttcattttttagttgttcaacctaagcaaactagttttggacaagaattatatccgtcttttgctgaaaaagctgggattttattaattaaattagttaaaaagcatgtttttgaagatgcaaataaacggactacagcaattgcattcttactatttttacgacgcaattcttatgaactaacctgtgattggcaagatttagcaaatcaaatcttaaagatcgctcaaatagatgacaatgaactaaattaccaagaaatctatcaatgggttaatcaagtaattcatgaaaactaaaaataatcgatatcattttcgccctaatattatattttatatgaaataataaccactttataaaaaaataagggctattaacccttattcataataaatccatcaactatttcctatgtcatactactactcgattgtcctgcataaccagctagtgtagcctgcaagtcatgaataactttaggagcattaaaatttttagcaaattcgtactgttgcaattgataatataatctagaaccgatatataaagcagaatcattattttccgcttgatcaattgttctatccaaaattcttaccaaatttggattatcaattacatctttactaaaacgaactttttctagttcattttttaactttaaagtctcatccttcttaatcattatttacaccaaaggatgcgcaaatggtccatccttctgccatccagtatacataatacgaccaacgctatcccacatttgtgctaaattatcatgacaataatatcggttgcaatatacaccattaccatagtaatggtactttccgcctccgcgcttgtgatgtgtaccgcctaaaacttgacttaattgattttcttttagttcttgaaactttaccattccagacacctccgataaatctttaagcctgcctcacttagtacttctatcaacttacatatataagtctaccaaaacagtagtgttttctaagaaaacgtcagaaactggcaacgttcatatcatattctgttaaaatacataatttgatcaagaatttagtacctgtcgatttaccaatcaaatactccagttacaataccgttagcacccactgctgcatatctttctagtttcagctgaagttcaactatagctttaggtagttcattttcactaaagttttctttcaatttcaaagacaaattagaagcaatcgattgaattgactcatgcttatcagctttcgcaatagcagcttgtaataactcaaccaattcggcatttttcttaacttgaggatctgaaatcactgtattcaatctactcttaaatgcagcttcttctttaagattctttttaaagaacatatttatctccttgtattaaccttgatttttcagaaaatcatacaactcagtagctgtttttcctccacctacccatgcgttagcaatttcaccgtttttaattcgcataacagtgggagtacctggcacttccaagttatcaaaagcataatctgcattatctttactttcatcaatatttaaatagtataattgaccaccaatcagattattaaattcatttaaagtggctgaatattgtcgacaataatagcacgttgggcaaccaatatacaaatatctatcaatattatcttttttatcgaaaaaagaatctacttcatctgaattaagagactgtaaaatattttgtgtaaggatgaatgattccttaaatttatttctttaaacattagaaaaaggagttcctttctcgtatgattggtttgaacaaaaaaacacatacagaaagaagaactccttcatgaatgattttaccaaagattttgctcaagctctattcaatccagacaaaataaatgatttattgcgcaaagagctacaacaggctgttaataacttgttagaagctgaattgactgcctttctgggctatgatccctatgccagaaatggctggaatactggcaactctagaaatggtgcttatttccgcaaagttgatacgcaatttggcccaattgaagtgcaagtgcctcgggatcgcaacggtcaatttcatcagcacacgctgcctggctacaagcagcactcggatatcttggaaagcatgattatcaagctttactccaagggcgtgaccaccagggaaatagccgatctaattgaaaagatgtatggcagccattacagtccagcccaggtatcaaatatttccaagcagatgattccaaaggttgaggcttaccacaaacgcaagctaagcgacaagtttttctgcgtctatttggatgcgacataccttcctttgcgccgagaaacatttgagcgtgaagcagtctatattgccattggcatcaagcctaatgggcacaaggaggtcattgactactgcattgcacctagcgagaacattgaagtctggacagatatgcttcaaaacatgaaatcccgaggcttaaagcaagttgagctttttctttctgatggtgttgttggcatgaaaacagccttggccaggacttatcctaaagctcattttcaacgctgcttggttcatgtcatgcgcaatatctgcgctaaagtacgcgtcgacgatcgtgaaaagatcatgaacgaattcaaacaggtgcatcaacagacaaacaaagaagaagccacagctgtcctgcatgacttctataccaaatggggcaaggtttacagccatgttatcagaagcttgaaagacatagaaccagatctgctggtcttttataactatcccaagcagatcagagcttcaatttattcgactaacatgattgaatcatttaacaatgtgatcaagcgcaaagctaagcctaaggcagagtttccaactgaacagtcgcttgatgcttttattggcattcaggcaatgagctacaatgaccgttatttcaatcgaattcataaaggctttggtcaggttcaggacaccttagaatcctactttgattaaataaataattaaaaaatcaatttacgagaaagaactatttacacaaaagatttgacagtttcttaattggagacgctacaacttgccaatttatagctaaaatacctaaaattaataaaataaaaatatttgtatatttttattgctttttcatagttttatattcctacaaaaatctcagcagcaaaacaatggaatcacaattggtgccacaagttttactgttctaccaacatccttaccaaatttatagcaattatagcctcttttaacacctacacattctagtaagttttcatcttttaaactttcaaattttttcataattattcctcacctcgcatatttacatagtccttccttaaatccacgccaatacttaccttccgacttccaaaacttgttccatcctttactacctcctacaacacttaccaattcgtttgaacttaacttttcaaaaccaacagtattttccatttttatacctccgataaatttttaagtctacctcgcttagtacttctaagcgcatcatcaacttacatgtataattttaaccaaattaattcaatatccatgttatcgttatatattgttaacatatacatcacgcgtggtgctagttaaatcgttctagacaataagccaaattataagctaaaattgcaatttccaaccggctttgaaagcctatcagactacgtgctcgattgttctcggcattgtaataggtcagaagcgaaaagtcgctttcaattgttctgcgaatagccatcaattgatgatcattgtgctttttagctcctgtcatatttttacgatatggtgtccaaagttcgtaacccatttgttttagctgttgatgcagttctttgcctaaatagccttcgtcgccaagaagatagtaattagatggatgggtattttctatcagttcaactgtctccctggcatcatgaactgatgcctttgttacgacataatcaagaatgtaaccgtcatcgctaacaatggcatgaactttgaaaccatagaagtaaattttcttggtggccttataaccaatgttggcataaccgcgaaaaattttagcacgatagtttcgaattggttggcaaacaggtaccggaaagctgtcaatgatcaagaactgtccattcaggtcaacctttttattcatttcttgccgtatctgataaatcaattgcaatagctgacgtgaacgccgattaaaacgtgagtgtgataaacaattgaaacattcacagaatcttctttgtgattcaattcctgtcttagcttgccagataagtaaagccaaaatcagactgtccgtagttttaatttgatcaatatttcgccgatgagtaaactcagccggtgcatacaaacgataccagtgccgacaaattatcactaaatctttaaaactaacttgtaaatggtggctaaaacgcttaagcttaaggcagttcaatcagatcagactcttttctattattactatttacaagtcgagtctaacaagattggacttttttattaactaaaacgatttaactagcaccacgcgtatacatcatatttcactatgttacacaacttgataaagcatcattttactttgtatttccaaaacagtttaacaaaaaatcatcagtaatcgcgcttatacaaaaataatcgatatcattttgccaactatgatatcgattatttacatgctgtttgatattgaatttttttattttctagatcgaaccagttaagcccgcaaatttccacttatctggattctcatttaacatgatctttaacctaattagtgcctgtggtaatttaaaaccatgtactagtgaataattattcaaatcacggttcagttcaaatactaccttatcaaaattaacaccctgagttaacttgcttaaaccttgattgattaacttcgttgcatctcgatcatttacagtctcttgtcttaattcctcaagaatttttttaagattttgtccattatcttgcaattttaagtcgcttccttttaattaacctctactgccccatggtccatattgtaaccatccattggctacggtttgacccgctttaccccaaattgcaccgtaatctgggatagttttatgtgtcttagtattatacaacatatatggagttaatcgaataattttaccaccaacaactctatttagctcaatattatttactaccttaaaattcttcatttccaatacctccgataaatctttaagcctgcctcgcttagtacttctaagcgcctcatcaacttacatatataactttaccagaatagcaggattttctatgacattgtcataaactgacaatattcacatcatattctgctaaagtacataatatgaacaaaactcatttagaatttagcaccctggatctaatataattaaagtagctagctcttcccgtaataattgacacttttccctgcatcccataccgcaaaaaatttctctctgacttggtagtttttaccatagtttccacttcaaacatacttatttttttctgttgaacagggtaagtacctatattagtaatttttccattaagtatttcagatgttccctgcttattttcaatattaaacttcatacgttgacccttatctagcacagccacttcagagctaggaacgtacgttattactcttaatttctttctatcccttatatcaggcatcgcaacactattcttattatctagatgaataataacattattttctaacataccttttttgccatcagctagagtgacactaattcctttagataatttttgcccttctttatattctttattctctaacgttactacccgatctggagtaataactcccatactattcatcacattttcatgcacagcaaaaaatgatccaataaatagtaaaatcacaaaaataaaagctggtaaaattatcattgtcgaaaagttacgaaaattatatgaatagaatttactactttctaaatcttgatcattcatttaatatcacctagcttttcaccaaatcataataatacccatgtttagccattaattcactgtgattaccttgttctacaatttgaccctgattcaataccacaatattgtcagttctttcagcaatagctaaacgatgcgcaataaatataacagttttattctttaacctaattaaattatcaaccacttttttctcagtaattgtatcaagcccacttgttgcttcatcaaaaatcaataccttagcaggtgaaagtaaggccctagcaattgttaatctttgcttctgaccacctgacaaaatcttagcattttcatctaattgtgtattaaatcctaatggcaatttttcaatgtcattctttatctccgcgatttggcaagcttcttctatctctttttcagttatattcttacgacttcccaacaaaagattctctttaatggtacctgcaaaaatatatggagtttgtggcacataattcacatatgagcataaaacatgcttatttatacttctagtcgaatgaccattaaaagttacttttccttttgtgggactgaaaaaatcaaccaacaatttaaccatagttgacttacctgatccactcattcccacaatagttaatttctcattatctttgatcgtcaaattaatatcttttaagacatcttcaccatatccataacgataatcgacatgtgagaaattaatgtctccatttaaatcatgactatcattaactgaagttttgcccttaaattcactttgaactaaataaacttcatttaaacgattctgagctacatttgcagcttgaagtgtaggttgcaagttaataatattttgtaatggatcaataaaatatgataataatgcattaaatgccatcaattcaccaatagacatctgattatgcattacaacacttgcccccacccaaagaataatgacattcagtgataatctaataaaagttttcaaagcagtttgaaaagcttctgttttgctatacttaaaagctttttttaaataatcaacaaactgactatcaatttttcgataacgtacttgttcactgtttaatgctttaatcgtctcaattccttgaatatcttcaataattgatgaactaactaccgcattactttccatctggtcattatttaatctttcaaacctttttgaaaagccgagaataacaatagcatagagtggtaatgaagctagcgtaatcaaaaacaatgtcatgttttgaaccgccaaaattatacccattaaaattacaattgaaagatcaaggaataatgaaatcaccgtacttgccaatgcatctataattctacttgcatcagaaaaacgagaagtaatctcaccagtttttctggtagtaaaaaattccatcggtaattcaaaaatatgcttaatgtattgtaaattaagatcgattgataaccgctgccccaaaacattcaataaaaattgctgaccatatgaaaaaattgagttaaagacatatgcaatcaataacccaatagctaaaacagataacgtggtaaatgtaccgttaggaatatatgtatcaatcaacccttgtacaaaatatgagctacagatactaatcagtgtcatcagcaaagcagctaaaataatgtttctaactaactttttctgtttaaacatataagggaataatgataatagattattctttttctcctttacaggcttaaaatctgccttaggcaccataaacaatgtaatacctgtccactctttttcaaacgcctttttggacatttttttaattccactagtaggatcaggatcggctacgattatttttcttttagtatttttaagaactacataataatgtaacaatcctccatcttttatcacatgaacaataaaaggatattgaatatctttcatattgaataaggacatatctgcttttaccgcttgaacatccatattgaatttttccgcagttttaactaatcctaaagcagtagttccttcagtattggttttagcaatatgacgtaaatgtgctattgatacttgagaatgataattctttaagatcattgctaaacaagctgcaccacagtctgtttcatcgatttgtggaacataaattgatttatacgttaacatgcccatcatttatctctttctgcttagctaatttctctgttttataattatatctagcaagaaaatctttcatcattttcacactactacgtgaaaaatcttcaacatccccattaacaaatgagacacgatgctgtttcaaatcaatcgactcaatgttcttcggattcaccaaacaagactggttaatcttctctaacataggattttctttagcatattgattaatactacctaaaagttgcatttcacctgtcgtcaagatcattaataacttgtgcggggttatagttgttgaaatataaataatatcatcaatattgacattcctagtttgacgtccaattttatacgaaaaagtcattttcttcatataattgaatttgtgtaagttgtagatagctacttctacagtctttaccatcatctgtctaaatttatccaaatcagatgtttttacaatgtagtcaattggacctaatcgtcttctgaatgtaattaatgataagtctgcatgactagttacaaagataatttgagctcgttcatctcgctttttaattaaggcagccagatcaaagccagtatcttcttccgtatcaccgcctaattcaacatcaagaaagtagataccaccatctaatttatgtttcttcagataatcaattgcacccatgtaatcagttgcagatgcaattgaaaattcaatttcttcatcatctgacaaaatcatttccgcagcaccaagaattttcttagtttgctcaatttgattttgatcatcatcacaaataaatactggatattgcattttttatttttcagtcccactttcactatcaggcaaaattgttaaatcaaaagtaaaccacccatcatcaacatagtaattaacaatcattgaatcttcatatttatgagtaatttcttttacattcgctagtcctaaacccatatgatgtttcttggttgtataattcttttgacttattttatctgtcgctactccactttttctaacgcgatttcgaatttcaaactcgaaatcgccgttttcttgataatacattgcatctattcgcgcactattagagttacctgtttctttgatcaaggcctgactttcttctgcagcattatcaaacgtgataccaattattctgaccagatctaaaatattaacactatcaggaattcgagaaatgtcgtgttcacaatcgaaactataatctagacctaaactgtagagttttgataacttagcaattgcaatactttttagattgttttcatggatatgatttacgcccttatacttacgcaatgcttttttattaaactgtgtttcagtgtagtgatcgagaattttaacaacctctttagagttaccttcttgagcgcttacttttaaaccatttaaaacattttgataatcatgcttaaagcgacgcaaatcatcttcgtttttgtcaagataacttgaatattcccgtagttgtttcatttcagaactcaattgctgctgcttaagaatcaattccttgttttctgcttcttttgctttcctgtcagcgtttgccaattccagctgcaattgttgttccttttgctctcgtttggttagaagatctttttgaattttaacagttgtcaaataagcaaatacagaaaaaattatttgaagtatcaataaacttaaagatacttcaaataataccgtcatatgtgtactctgtaatgctaaaaaatacacaatggaacttgataaataaacatataatattaatccaataaatattgaattatttcgatcatttaaaagctttcgaattttcgaaactgtcaaatcttttgtgtaaatagttctttctcgtaaattgattttttaattatttatttaatcaaagtaggattctaaggtgtcctgaacctgaccaaagcctttatgaattcgattgaaataacggtcattgtagctcattgcctgaatgccaataaaagcatcaagcgactgttcagttggaaattctgccttaggcttagctttgcgcttgatcacattgttaaatgattcaatcatgttagtcgaataaattgaagctctgatctgcttgggatagttataaaagaccagcagatctggttctatgtctttcaagcttctgataacatggctgtaaaccttgccccatttggtatagaagtcatgcaggacagctgtggcttcttctttgtttgtctgttgatgcacctgtttgaattcgttcatgatcttttcacgatcgtcgacgcgtactttagcgcagatattgcgcatgacatgaaccaaacagcgttgaaaatgagctttaggataagtcctggccaaggctgttttcatgccaacaacaccatcagaaagaaaaagctcaacttgctttaagcctcgggatttcatgttttgaagcatctctgtccagacttcaatgttctcgctaggtgcaatgcagtagtcaatgacctccttgtgcccattaggcttgatgccaatggcaatatagactgcttcacgctcaaatgtttctcggcgcaaaggaaggtatgtcgcatccaaatagacgcagaaaaacttgtcgcttagcttgcgtttgtggtaagcctcaacctttggaatcatctgcttggaaatatttgatacctgagctggactgtaatggctgccatacatcttttcaattagatcggctatttccctggtggtcacgcccttggagtaaagcttgataatcatgctttccaagatatccgagtgctgcttgtagtcaggcagcgtgtgctgatgaaattgaccgttgcgatcccgaggcacttgcacttcaattgggccaaattgcgtatcaactttgcggaaataagcaccatttctagagttgccagtattccagccatttctggcatagggatcatagcccagaaaggcggtcaattcagcttctaacaagttattaacagcctgttgtagctctttgcgcaataaatcatttattttgtctggattgaatagagcttgagcaaaatctttggtaaaatcattcatgaaggagttcttctttctgtatgtgtttttttgttcaaaccaatcatacgagaaaggaactcctttttctaatgtttaaagaaataaatttaaggaatcattcatccttacacaaactattttacagtctcgaatttttaaataatacttttggattatacttatagttgcgatatctagaattaaaaaagtccaaataacactaccaacattaataccaaaaaataatgatattatttcaacgccaatagtcgtaagcaaatctaccatttcaaaaaataatattgcaccaatatttgactttatccttttatctctttttataaaatatgagaataaaagaatacatatgacttgaaaaatatctactacgaagtcatttattttagcggtgaagctagttgtaaaacaagctaaaacaaagaaaatcgtaaacactaaatcttttttttggaatttccaattagataatttataaaaaatacgcgtggtgctagttaaatcgttttagttaataaaaaagtccaatcggactagactcaagttgtagtatcaaaaagaaaagagtctgatctgattgaactgccttaagcttaagcgttttagccaccatttacaagttagttttaaagatttagtgataatttgtcggcactggtatcgtttgtatgcaccggctgagtttactcatcggcgaaatattgatcaaattaaaactacggacagtctgattttggctttacttatctggcaagctaagacaggaattgaatcacaaagaagattctgtgaatgtttcaattgtttatcacactcacgttttaatcgacgttcacgtcagctattgcaattgatttatcagatacggcaagaaatgaataaaaaggttgacctgaatggacagttcttgatcattgacagctttccggtacctgtttgccaaccaattcgcaactatcgtgctaaaatttttcgcggttatgccaacattggttataaggccaccaagaaaatttacttctatggtttcaaagttcatgtcattgttagcgatgacggttacattcttgattatgtcgtaacaaaagcatcagttcatgatgccagggagacagttgaactgctggaaaatacccatccatctaattactatcttcttggcgacgaaggctatttaggcaaagaactgcatcaacagctaaaacaaatgggttatgaactttggacaccatatcgtaaaaatatgacaggagctaaaaagcacaatgatcatcaattgatggctattcgcagaacaattgaaagcgacttttcgcttctgacctattacaatgccgagaacaatcgagcacgtagtctgataggctttcaaagccggttggaaattgcaattttagcttataatttggcttattgtctagaacgatttaactagcaccacgcgtataaaaaataaataaatctactattggtgaaattaatccctgtatcgctatcattactttaatccaagaaactttttccaattaaagtgaaacaatgggcgttttgacttattaacaatattattcattgcaaacaaattttgattaaaaaccatattagtaatagcaaatccacctttaacctcaactagctcttcttcattcaactttttcattatttatgcttcctttcaatttaatgcactaacaatttttacactgttaatgttactacgagcgcaactttatgattaaaatcgtcatattctgtaccatttagatcatattctgcattttcaattaaaatgctcctccaccagaaccatttccccaactattcgacttcttcttgaaaaaatagcgtttagattttgatcgtccacccacaatttagacatgaactagatagcttccgcatattttctcttcccttcatttaccattttgttacaaataaaagcataactctatctagcttctcaaaattaagctcatcagattttgcattatcctaatcatattttgctaaaaataatcaatcctctttctcctctggccaaaaaagatcatctaatgtcttatccagcgcctggcaaatcctgatacacaagttaaccgacgggttataatttcccttctcaatcgcagaaatcgtctgtcttgaaacatcaatctgctgcgccaaatcttcttgcgttaaatctttaccgactcgcgcagccttcatttttaaatttttcaatccttatcactttccttatcacgatggagttgaaacaggcttactgctccaataatcaaccaataaatccccataatgttcagcgcactgttaaagtcatcaatatatcctagaatcaagcaaataccaagtaaaatatatagccaactatttgccttaacatgctcttcattaaatgcaaaatatgctccatggactatatcgtaaactgacatcaccgttaatgacaacataataattgcaaagttaacagcaataccatgctttgtataaaaatccgtctgcatgaataaagcagaaattacttctccaacgattaacacaagaaagctatacctgtcaccacgaccacgaatcaattcctgtcgttcatcatactttgccgcacgacgatttcccacgaatacaacgactaagatgaaagtcataactgcaaacaagcttgcaaaagccattaattttaatatttcaaattttgacattttacacatccctttcttttaatagtttgatattaagcccatattttcaaaatgtaaagtatgttttacatttttactaataaatttgtatttataaaaactagcattaacataatcggtatcatttcactagatttgataccgattatttgttaatgatacctatttttcaaaaatttccttgacttcttcttttaatcgtcgtattataatgacaattaaattaataaaagcttagaagagatgagtaattacttaagacttctgcagagagtcggagttggtgcaagccgatgtggttgagagtaatgaatatggtcttggagctagtttaaagagcaagctgttaagtaagcaatttacgagtgacgatcgttaccccgtccgagtattcccaattttgggagcacttagtaaggagttagttgtgaagctaacttgaatttgggtggtaacacgcttaggcgtccctagcatagaaattctatgctaagggcgctttttattttgcttatttaatttttcagaaaggagccagacaatggataaacctatcaaaactacaagttcacaaatcatcatcagtaaaaaggcattcaaccgaatgtgcactattgtctggttgatcttgatcatcatcggacttttcatcgttaaataaaacatcgaagcaaaactaaggagaaaaattatgacagaattacattacgatatcgttggtagctttttaagacctgcagaattaaaaaaggctcgcgcagaatttgaagaaggaaagattaagcaagaagaattaactcatgttgaaaatacagagatcagagaattagttcaaaaagagattgatcatggccttaaaatcgtaactgatggtgaattcagaagaagttattggcatcttgataccttctggggctttgggggtattaaacacactaagcaggcccacggctatttcttccatgatgaagaaactcgtaacgactctgcccaagttgagggaaaaattaaatttactggtaaacatccagatctttcatcatttgaatacttaaaaaaggttgtcgatgaaactggcgctaacgtaattccacggcaaagtattccagctcccgcacaattttacgcagaacttgttcgtggagaagaaaatattgccgcacttaaaaagatttatagttcagaagaagatttactcaccgatatttctaaagcataccgagacttaattttagccttatacgatgcaggatgtcgcgacattaaactcgatgactgtacttggggtatgattgtagataagcgctattggaaaagtcatttacaagatgacttttcactagacgaccttaaaagaaaatacttgaagcttaacaatgatgcaatcaaagatttgccaacagatttgcgaatatcaactcatatttgtcgcggtaactatcactcaacttgggcagcccaaggaggttatggtccagtagcggactatgtttttgctaaggaaaatgttgacgccttttatcttgaatttgacaatgatagatctggcagttttgacccaattgcacaaattcctaacgacaaacttgttgtcttaggtttagtaactagtaaaaaagcagaattagaagatccacaaaaattaatcgctagaattaaagaagctgctgaattccacccactaaatagtctcgctttaagcacacagtgtggcttcgcctcaactgaagaaggcaacacgttaaccgaagatgaccagtggcaaaagatcaagttggttgtcgacactgccaagcaagtttggagctaaatggcaattaactagttaaaataaagataaatagatttagacaaaggagaaaaaaatcatgggaaaagttgaaagttttgaattagatcatactaaagttaaggcaccttacgttcgtttaatcactgttgaaaaaggccaaaaaggtgaccagattagcaacttcgatttgcgtttagttcaacctaataagaacgccattcctactggctgcttgcacacgattgaacaccttttagccggtcttttacgtgaccgcatcgacggctacattgactgttcaccatttggctgtcggactggcttccatcttttagtttggggcaccccatcaactactgaagttgccaaggcacttaaggagtcattagaagaaatccgtgacaacattaaatgggaagacgtaccagggacaacgattgaatcttgtggtaattatcgcgaccactcattattctcagctaagcaatggtcaagagatattttggctgaaggcatttctgatgacccatttgaaagacatgtggttgaataaaatttaaaggtttaactgaaaaatagtaaataattaaaaaagctagcaattcattttagtgaactactagctcttattttttcacttatatcatcccggcaactaagccaactatatacaagaagacacagcagactaccaaatacaaaccgccccacttgaccgtttcttttaggatctcgccttcgtctccctcacgattaattgagccggttgctactgcaatattctgcggtgaaagcatccctgccgtggcccctgtcatgttcgaggctacaacccagtacttacttacgcctaagtccgttgctgcagtatactgcaaattaccaaataaaacattagctgatgtagcagatcctgttaaaaatgttcctagtgcaccaattaacggcgcaaacaatggataaactggtcctaaaaggccaaccaaggccactgctaatgcattcgtcataccagcataaaccattaccttagccaagcctacaatcgcacaaactgtaattgtagttttccatacgctttttatcgattgtcctaatatttgcatcatttttttcaagctgacaccctgaatcgccccaccaattaatgtagctacaaaaattaatgttccaggagaagataaccaactaattgacaatgtatttgggttctttcctgtataaacaacaagattagtggttactttattaagtacatcattgacagctggaactaatgaagaagcaaagatcacgaagataaagaccaaaataaatggtgaacatgccttgagcatttccttagcatttggacgtaaaacatctggctcttcttcatcatcatgccatctagttaataagactgtaatcgcaattgaacacaatgagccaacaattgcaggcaattctgcccctacaaattttgcagctattacctggggaatagccattcccagtcctgacatcaatgtaataaagcctacacctttaattgccttaatgctgccttcagtcaagataactaaaataaatggtaccagtattaccaaaatagataattgcaatgttacgatgaaggatagtttttcttgatgtagacccgtcacttcagctaaagttaaaactggtaatccaattgcaccaaaagccgtcgcagttgtattagcaatcaaactaatgactgacgcgcgaatcggatccaagccaaaggcaatcaatattcctgccgcaattgctaccgcagtcccaaagccagcgattgattctaaaaagccaccaaatccccaagcaataatcaaaacaataatccgcttatcggttgaaatcgtcgccagcatattttgaataatttccataccgccagattctgtagtaacgttatatgcaaataaagccatgacaataacaaacataatcggccaaatgcccatgataatgccttctagcgccccacttgccgtatctagcaccggtactttaaaactaaagactgctaacaccatcgtcaaaattaagccaatgacacaagcgcgtgcagctggcattcgcataactcccagcgaaataatcaaccaaacgatcggcaacaatgcgatcgcaaatctaatccacatcaaaatcctccatcatcaaaagtgttgtactatattatttaatcatgatttgggtaaaaagttaaaataagacacaaaattttagtttaaattacaattttcacaaatttcacttgcaagtttaaccaacaaactatataacaattaatggaaagtaaaatttctcacatcatgtttgaactactccgtggaatagagtagttctttttttgcgtaaaaaaatagccagaccgaattcagcctgacttctgttttttttagcgatgtttaattacgtgaataccataagcgattaagtaaattaccacttcgatcgttgcaataaagaaagttaccggccagttggtgataaagccgagatacagtccagcccacacgccaactaaagcgaaaaacacggaccaactgatcattgctggtattgttttaccaatatagcgcgccgttgaagatggcaatgttaatagaatgaagactagcaatgaaccaacaatctgggcaccgatagcaactgacatagccaaggctaccaagaaagcaataccaacccagccagtatgtacaccatgtgcaacggcaccgatatggtcaaatgagtcaaaattcaagcttcgagctaccaaaataattaatagtaaaactagaattgacaaaaccactagctgaatcacgccttgtttatcaacaccgatgatactaccaaacagaatattagtagcgtaacggctatttgatccagaaatggctaagaacagcacacctagcccaataaacagagctgagatcgcactaactgacgattctttttgatcgctgtgcaaggacaattctcctactccaattgaaccgagcaaggtaaatagtagcatcccccataacggtgcaatgccgataaagacggcaaaagctgctccagcaaagccgatttctgacagtgtgtgagctaaaaaagcataactccgtgctactacatatacaccgaccacgccacaggtaatcgcaatgaatgtactagctaagaaggcataacgcataaattcgtattgaaacattattcgaaatcctccttaaatttatccatctttccttgcctgatcgttcccttatttaaatatagataatcagtcatatactttttagctaaaggaatatcatgagtgacaaacaaaacggtaattttgtgttcacgattcaggtgcttgattaatcccatcaattcttccttagcagccggatctaggctagctgttgcttcatctaagatgatcatattgggatgatcaagtagagcctgcgctaaatatgcacgttgtttttgtccacctgatgcctcacccattcgggtattctgaatcttttctaaatgagtttcttctaactgatgatcaatctgttccttaacctttttggtcttaaacaatggggcgttaagtccaataaatgcacgaatcgacaatggatactccgcatcaatatttctaaactggggtacataacctaacttaacgtctgaatcaaacttaaagttgcccgcagtcggctttaacatccccattaaaatcttaattaaggtggtcttccctgttccattaggtccaagtagtgcagtcattgacccgtcttcaagctgaaaactcaaatcttgaaaaacatctttagtatcaaatctcatcgagagatcatttacttctaaaatcactcttctaccccctccctaagttgctattatttttctattttagccaaattttgataattttctttcatccaagccaagtaagtagtgtggttaggaatagtctcccgcacatttaacactggaatattattttccttagctaattttacaaataacttcacagttgaactgcttgcctgtgtattgttaacaaagaatgcaatcttttttgctttaatttcattattcatttgattaatcatcttaggactcggatcagtaccattctcaattgcttcttcaaagcccttatccccaatcttgtatcctgcttctcttaaagcataatcaaagacaggttcactaacaaagactggcttactatttttcttattagtcttcaccaattgcttaacttgattaatcttagctaaatacttgtcaccattagctttaaaataagctgcatgctttttatcaagcttagataaacgcttaactaggtaattaacatacttggttggcatacttagattgtaccaaatatgcggattatcccccttctttaatcccatcaagtcttcaccaactaagacaggctttttgctaacagaactagctagcttattcatccaagaatcatagcctaagccattagcaacaataatatttgccttggtcaattctttagcatctgccgtagttggttcaaaatcatgaggatcggtactgctattgctaatgattgccttagccgtaccatattttcctacaacatttttagcaatatctgcataaacattggtggtggtaataatcgagacttcacccgaattgctcgtcgaatttgatctattcgagcaagctgaaactaacagcgcaataacgccaattagtcccaaaaaagagattaacttcgtaattttagatttcgcattttgcataaaatatcctccttgtgcaaaataaaaaagcatttaagttagaaaattcagcataaattctaactaaaagttagaataatctagttaattacatatgtcaacatatttttgcatagacaaatagcaccagtctcccataagcctgatgctatcaataatttaagtcataaaattttgctgaattttattaaatgctttgttctaaaattacattattatataaacatatttttatataattgtcaaactaaattaaaattcttccttcacgtgctgacgcaaaacatctaagattttaatcacatgcttatcttctaagctataatagcgctcctgcctaacccgctcgctcttaactagcttagcctcttccaaaatacgcaagtgacgcgaaatagctggctgactaacatcaaactgcttaactaaattattaacactacttttttgattatcatttaaataatataagatttgaattcgaatcggatgattcaacgctctagtaatccgaataatttgctcgtccaatttcttcacccattcatactttttaatttattatagcttaaatttaggtataaaaaaacgctacccttcgggtagcgcaaaacataacagagtatcttgatttaagtagagatcatcaagatatttatattataatacgtttttgccaaaatgtattgttttttgattaataaccagaattatttaataataatattcgatattacttatagtattattcgtttgggtcttctttgacattcttcttccagaaactcatgattaaaccagcaacgattgaaccaataatagtagctaggaagtagaataagatgtggcttggaccaccgatgttaccagcaagtggtgatacccaaagaccaccgtgaggagctgggacaccaacgtgccataaaccaactaaagcaccaccaacagctgaaccaatgatacatgatggaattacacgacctgggtcagcagcagcaaatggaatagcaccttcagtaatgaatgagaagcctaatacccagttagaaacacccgcacgacgttcttctacagtgtacttgttcttgaagaatgtagtaccaattgcagtagcaaatggtggaaccataccacccaccattacagcagccatcaagatagcagcagtagctgagtgagggtcgttagcaaatgcacctgaagcgaagacataagcagccttgttgaaaggaccacccatatcgattgacatcattccggcaaggatagtggtcaaaagtaccaagttaccagtacccattccgttcaagaaatgagtaatagcaaagttaatgccactaaagattgggttaatgatgtagaacataattgctgcaataaagagcaatcctaaaattggatagaacagcattggcttcataccttcaacagaacgaggtaatttagcaaatactttcttcaaaccaaccatcaagtaaccagcaataaaaccagcagcaataccgcctaagaagccggctggtgaagttgcgtgagcttgaacgttaacttggaattgaccgttaacaatagaggccatgtaaccaccaacaaaacctggcattaaggctggcaaatcaccgattgattcagcgatataggctgccaaaactggaaccatgaaggcaaatgccaagttaccagcattgtttaaaaagatgaaagcaggagtcttagcgccacccatgtagttttctacgatgaatgagatggccattaagataccaccaccaataacgaatggaagcatgtgactaataccattcatcaagttcttgtagatacctgcccacaaacctggcttctcagttgatgaagattcagttgacttgtcttgagcacttgcacggtaaacatcagccttaccacccataatgtcatcaatcaattcgcctggcttgttaattccatcaacaacaggacggttaactaagtgcttgccgtcaaaacgtggcatatcaactttcttatcagaagcgataataacacctttagcacgcttgatttcatcaggagtcaacttatccttaaccccttctgaaccgttagtttcaattctaacttcgatgccgcgcttcttaccttccttaatcaaggcttcttgagccatgtaagtgtgggcaataccgttaatacatgcagtaacaccaacaatcaatggcttgttgtcgtcatcacttgtaccttgagccttagcagcttccttagccttcttagcttcagctgccttcttgtcttcttcgtcttttttagcttcagccttttcaaaaagatcgataacttcttcaggagtcttagtattcttcaaagcttcaactaaatcaggatcaattaacaaacctgaaagttttgctaatgcttgaaggtgagtattgtcagcaccatctggtgcagtaatcatgaagaataagtgaactggttgaccatcaagtgaattatagtcaattccttccttactcttggcgaataatacgcgtgccttgttaatagatttgttacgtgcgtgaggcatcgcaattccgccaccaataccagtagttgattcgttttcacgtgcccagattgacttaataaaagcatcttcgtcgttaacgatatcagttgctacttcaaggtcagccatttctttaatggcatcttctttgttcttagccttaagctccataatcatggagtcagggcttaaaatatccttgattctcatatttttcccctcgttttttattaagaaatttgctcaactttgatttgtggaagaacagcatcaatttggctcttaactgcaatgtccttagtaaaggcagtagcagcaccacaagccattccaattctgaagccttccttaggatcttgggtcttgtagtaagtaccaacgaagccggcaatcattgaatcacctgcaccaactgagttaacagcagtaccaacagcacccttagcatggtaaacatgatccttggtaagaaggaaaccaccttcaccagccatagaaaccatcacattttgagcacccttatctaaaagcttttgtgcgtattcaagcatcacatcacttgaatcaaaagttacgccaaacaagtctgctaattcatggtggttaggcttaattactagtggcttatatgccaaagtatcaagtaaagcttgtccagtagtatcaacaacaaattctgcacctgcttctttaatagtaggaagcaatgattgatagaaatcagttggaaggcttggagtaagagaaccgctcattactacaatgtcgcccttctttaaatcgtttaaacgatccttaaaagcagtgatttcttggtcggtaatgttaggaccagccgcgttaatttcagtttccttttcagcgtggatcttaacattcacacgagtgttatctgaaatagtaacgaaatcactttcaattctcttttgattcaattgacgaaccaattccttaccagtgaagccacctacgaagccccatgccgtattatcaacatttaattggttaaggatttgagaaacgttaattcccttaccccctgctaaaaatgaatcattgttagttctgttaacttctccgcggttaactttttctaattgaagaacatagtcaagcgctggattaacagttactgtataaatcatcctattttgcctcctctaattcaataccgactggtaatgaccgtttttgacctggttttagttgatcagttaccacaatcacgtcacttgtattggcaaacacagcaaagttacgctcaccgattttactattatcagttaatacataagcgtgtcttgcctgtttgatttcggctgccttaaccgcagcttcctctggatcaggtgtagttagattgccatttttttcaattccattagcaccaacgaagctagctgaaaaattcattgccttaatctgacttaaggcggtctgacctataacagcatgcgtatcgtccttaacttcaccgccaattagaattgtgttaattccgtgatttaaactgcataaagcagtctctacaccattagtaataatcttgacgttagcaacctctgctaaaaatggtaccatctcataagttgttgttcctgcatcaatgaagacattgtcacctggacgaacaaaattctgcacggcatatctagcaatagtgatttttgcgtcatgattcaaactgaagcgaacgttttgtgatacatcacgagaaaaatgtttaactgattgggcaccgccatgaacacgcttaaggatcccatttttttccatctgaattagatctcgacggatagttgattcagatgttgcggttaagtcacataattcacttacgcgacataactcgtgttgattaacatagtcttcgattaagctttggcgctcctgagtcagcatcatttctcacctcgataaatattgtattcgctttctcctccaaaatcaatcatttttcttcaaaaaatgtcatttttatttattatcgttcaataacattcatttatatgcaaaaaagatgccgttttttgattgaaacgacatcttttcttcgtcatttggaattattcttagtcgttttaccctatttgactaagaatccgtaaagatgactaagaaagagaaccaaagatctattaaccttgcaaaatagagtagagggagttttataactcgcccctctcattgcaccggacgtacggttccgtatccggcgctacgtttgtgattatttacgagataaataatattctagcggatcgaccaagcctgggcgatccgctttgcttatgcccaatacttttgggctaagcagaaagttaatgacatgacccgtacttcttttataccaacctaagcgcgtattagctactttatgaatatcttcatcactaaaattgcactttagtgccttgttaatccgcattaagttaatgtatattcgttttggtagtttccattgtttaatgattaccacccgtactttatgacgcagccattgactgaacttaattagaaaatatttcatgtcgccaactctaaagtaattgacccagcctctaactacttgatttatcttagtaaagactagtgatagaggctgagcagctgcttttctgcgacagagaagttctctcatcttgtcataaagcttgattttgcggtcatctcctggctttgcttgccagtattcgccacttttccagaaggtaaagccaagaaagttgctcttggttggtcgtacaactttggttttggttgcgttgacctttaggaatagctttctttctagccatgatgaaattgaattcatcacacgtttggctgatttaccgcttttgacaaagatattgcagtcatcggcatagcggacaaagcgcaggcctctttgttccaattctttatccattttatctaaatagatattggatagaattggtgaaagagggccgccttgtggtacacctagtttattaggcttaacccaaccatcttccattactccagctttaagaaaggctcgaattaaatggagggtggttttgtcatttacttgctctctaattattgaaattaatttatcatgatttaccgtgtcaaagtatttctcaatatccaggtcaacaacccattgatagccttcgtttaaatattccaagacttgttcaatagcgtcatgagcactgcgtccaggtctaaagccatagctatgctcactaaaatgaggatcatagatcttcattaatacttgggcaatagcctgctggattactcggtcaacaaccgtgggtattcctaaaggacgtttcttaccattagctttaggaatgtagactctgcgaacagcttgcggacgatacttcatcttcatgatggcgtcctttatttctacttgatgctttttaaaatagctatcaagctcatcaactgttctcctgtctacaccaggcgctcccttattgattttgactctcctgattgcttccttgagattattttgacttaaaatctgttcaattagttccatctcgtgatatctccatttctacttgtaaatttattcagaattgtcccaattgctttcaccatcaaagagttacgttctctttgtgctaggctatcctcttatccggactgtctgaacattgcttatagcgagatatgctcttacaaacattaggcccttcgctccagtttcattacaaaaccttcagcactactacgacctcagctgacttctcgcgattaacctttttcgaccaggcttacgatcgctgatattaaagcttactcggtttcacctgtccacgagatctctcggggtaagacattcatctttaattttccactgccccctggtttaccgtcttggttttacggttgtcctttggactttaacttgtgctgcagtctcatccaccatttggcctgaccaggtttctgtacgtaggctcggaaaactcgctagccacttccttcacccatagcgtcaccgctaacggcttgtggttcgctacacttggcgacaactacccgtgatctagactttcactagactagacaaatgccatgcccgacacacagcaaaacacgctgaatcattattgattcagcgcgttttactattaaatatattttgtctagcctctcaagctacgcttaaagttttgccatgggccgacatcatctgtttgcaaaatcaagtttggatagatttttctaatccagataaatgacgctactgtagcggctaaagcaattaaagcagagatagctgcctctaaattagttgcgttacccataattactctagctggcattacaaatgatgatagaaacgggatgtacgataatactttagcaaaaatcgtatccccacctgattgcatattgactgtgaacaagaacccgatcaacatcaatgtagatagtggtcccaccgctttgttggcattctcgcttttagcaaccaaagcgccacagaaagctgcaaagataataaacaataccaagccgattatcgtaaacaccaatccccaagaagccagattgccaattgcttgatcaatcatcggcttatactgtctaaataaatcgctaaagccatcgatgtatggggccgcgcaataaactgccacaaaaccaacaacataaattaacacttgggtgataatttcaccaaaaatacctaaaatcttcccagtgaaataatcgccacctggcatactcgaaaagattacttccattatcttggtacccttctccgtagcgatatcttgtgctgttacttgcgtataagtgatcacaagcatgtacaagataatcagcaaaacccagaaggaaatttgcttaacaggatcattatcaaagctcttcttatcaacatgcttaacttgttgcttaaattgcgctcgcgtagctaaagactgagtctgttttgtcgttagcttggccttacttaaattcaattgttgctgggcggtgtttaggctagttagcagctctgattttagatcactgtccattttttcatcactatagtaagttgcagctaattgattattcttttgttcaattaaaacatagccatcgatatcttcatctttatacgcctttttagccttagcttcagtgctatagttgtcaaagtcttctgactttttaattgcttgctttaaggcagaattagaagtaactaccccgacatagttgtcatcactgccgccagctgataccattccgataacaaatgaaaagaagacgagcagaaacggtgctaaaatcatcagcaaatatgaccaagttttcacttctctacggtaggtttcttttgcgacaagccagatcttattcatgacgcgcacctgctttcattttgaaaatctcgtctaaagttggaggttcctggtcaaaagtctggatatattgaccggccgaaagttggttaaaaatatccttaccatatttttcgtctgcaagaataagcagcttcattccattgttttgcaaaattatatcttttacacctggtaaggctgataattcagtagcacttttgtctgtcctgacaaaaattcgagttaggccaaagctgttcttaatttcatttactgggccattcaagacgatatgcccatcattgatcattacgacgtcatcgcacaattcttccacgttacgcatatcatgatcagaaaaaatgatcgtagcgccttttcttttttcttccaaaatcagctgcttcattagatcaacattaacaggatctagtccactgaatggttcatctaaaataatcaatttaggttgatgaattaaagttgcaatcatctgtactttttgttggttacctttagacaaagacttaatcttatccatggggatccctttaacagccaaacgtgataaccaatcaggcaattcttcttttacctttttagccggcatccctttaaggctagccaaaaacactacctgatctgaaatagttaacttaggcatcaaacttcgctcttcaggcagatagccaatattgtcataatctttagcgttgaaagaatgtccatcaatactaatctggccgtcataatcaacgaatttcaaaatactatgaaagatcgtcgacttacccgacccatttttaccaaccagtccaagaatacgcccatctgacacactgaagctaacatcaaacaaaacctgtgttgacccgaagcttttatttaggtgttctatttttaacataatttttcctcaactttttatctaatggttattagacctagaagtacaccgtcaaagaactgccataaagtatcggttgaaaaaattgtttttacaatatcaactgacccccaattggttactaaagtaatcactacaccagctgaagcaaccactactcctgtaccaataacttgaggggcaagtttcaacactttcttctgccatggaatctttgatgcgaccgttttattaaggactaagcttgcggacatgatgccaccaaacattagaccgaaagccaatccggctccaatcgacataataatttgaaaaggttgaggcgaaccagcagtcttaacatacatcatcacaagagctaatattggtccaacaagtgctccaattcccatgccttcaataattcgtttgttttcacgagcaaatttttcattattcattgttcttacctcaaggaaattttcagctaattaaacaaatccgaaaacttagtcggaatgttgttcttggcgaagtatttcttgaatgcatccccaaaactcaattgatctttttctctattttcaagcaaatcatgaacagctaagaatgctgtaacggcgtaattaacggctaaaatgattaacaaaccgagcacaatataaattaagtacagcattgttctttcctccaattcagcgattatctcccaggaaataatcttttatccttttaaattaatcatatccccatcatttatgtaaaaggtaaaaccgtccaattctgtcatttttcggactgattttgcattttattcttcatcttttttataaactaataaatcccctggttgacaatccaagacttcacagatcttgctcaacgtgtcgaagcgaacgccatgcgcctttcctgtcttcagaatcgacaggttagccggcgttataccaactttctctgccaactcctttgaagacatctttcgcttcaagagcataaaatctagtgtcacttcaatcatctatatcaacctttctaaataatcgagtctgcatcctcctgaaccttcattccgtacttgaataccaagtagactacgtatagtactgctaggaaaagcaaaccagttgtcacaccacttgggtatagtacattattcgaggatttagcgaaccaagtgcggtgagttatgaaaataatgtaatctattattgaaataagggtatatccagcaactgaaattaataatttcttgagtaaattcaaattactatcagcaaagtaaacttcttgcttgatattcttaacaattaatctggcatatcgacagattaaaaaggctgcaacgctcatcatgatcagtgatagcaacacaaccactattgcaccgatatagttatcaactgatacgccttttatacccctaccactttcaaagccagcacgaaaatccggattatgtataccaaataacacaacacctcccataacgatccacataattattcctatcacacaaaatatttggtaaatccaagcaaaaatcgtaagcaaattcaaaattaattttttcatttttctatcctctcaaaatatggatgattctgtatatagcactgccaattacacccgttactccaattactaataatgtaattctaagaacactccatgttccgcctaagttagcaaacactaagattgccatcattatcagcattccaataattgaacctatctgtcttttcttttctggaagcatatctatccctctcttccataaaactatctatctctttctcgtcttttataattattgtattacgataatttataattgcaatacagaaataaaatatttttttgagataataaaaaaataccaaattagtcgttaaactaacttggtattatgttttatcttccaagctactgctttttacttttcttcttatagtaagagttcatgaaaatattcataaagataacaaaggctacactttcaactatattccaaaatactgttccaaagcttaatgttttgtactgaaaatagtcccataccaatcctattaacagggccaaaataccagcgatgatacttctgtttctaacttggcgctcggttaaaattttatttttcataatttttaccccattattatcatatcgaaaaataggaaatctattaaccgaattttctattttttaatattatctatgtttatgttttttatgtctattttgtttggcgaaatctttaacagcgccttctacacatccttttatcataccacttccgctagggagcgcatcaatgaaacccgataaacatgatccacctacaccaagccagttagtgccaccacttactttttctaattctttataattcatttctttcatcataaaagttacctccttttttacaaatgtgatacacaagaaactgatccgctaataatacccacattagcaccaaatatagctccacctactgtaccaattggagtaccaaatgcagtgcctgcaatgccatattttagtccatccttcaacgctcccattccaatagctttagcacaatttgtgatttttctacggcgtcttgctttaccaccgttaccaccgaaaacagctgacagttcttcataagttaaagtttcaaatttgttcatgtttttcccctttataaaacttctaattacaattttcataagtgaattaagttttacctctcttcaacttacacactaataatacaaaacaatttaccttcattggcgtataataccgatttagcacgaaacaagatctatttggaaaatatttaccaaatcggccaagttttcgtatattagtaatttacaaaggattcttattaattgttacgctaacttgatattctgttttataaatccgaaaactagtaaaaacatagacacaatgcacttattatgagaatggctaacaaaaaaatcttctcatagccaaggctacaagaagattgccatcacattaatgcataaactgatacgcacgctctttactttaataaaacatgatcaattatacgactataacatagccactcaaaaccaaaaacttgagtcgaaatcaaataatcatttttagcatagtaacctacgaaaaaaatcacaagtttcataggtttctttgcgttatcttctaagtattacgatattttctattggagatatttttagcctattcgcaccagtatttttttcaatacttatctactagttattatctacctctatgaaaagaactttggaaaaacttaggattttccaaataaacgtctcgtttatgattaccacctttcttactgtataaaggtagcatgtgttcagtatcagttagaccaatatcatctacagaacctgacccacctaaaattccgcttaaaagtacttcatctttagaaataatgattcgtttcatctacttttcctccttagttttctttcctaatgaaatgcccaaaactaaactgattaagatactaatcattccaattaattgaccccagatattatccttctcacctgtagatggtaaagactgagtagaaccatttttaatagtgtcattttccaatcgctttaacttagtaattctattttgattgttcttaacggcactataaggcttgctttgcacttttactgaatcaaattgtttattttctttcacacttccgtgtttttcactaactgctgctagaataatattctttttatgcgatttagctgttttcttgaccttagtggctacgattttaggttttactggcttcttcacagttttcttcttagtttcagctctaggagccgcatactcttgattacctgtcgtaactttagtcagatctgcagtagagctagcaacatttgcagcattctcaaatacgctattttcaacaaagtcagtaatagcaacgtcattgctagactgtgtttgatcatcttcagctacagtcacttcaggtatttcattactttcagattcagtagtattatcatccttcggttgatccttaattactgcctgttccactaatttattagctgcatcagaatacaaaaagttatataactcttgtcccgtcttttctccaccgacccatgcactaataatttttccattaataaatctcattgtagttggagtacctggaataccaatttctttgaaggcatactcatgtgctccttcttcagcatcaatattgaaataaagcagcttacctttaacgatttcattgaaatcttttaaatcaggtgaaaattgtcgacagtagtaacatgttggacgaccgatatacataagatgttcttgattatttttctctgctagaagatcttttacttcttgcatttttactctatgaaaatcttttacattgttctcataatcttcaacagatacctcatcttcatcatcttcactatcttcctcatttgcattattaggatcttgattattagtattctgtgactgattattttgatcttcagaagctgctggctcttcttcctgcttattttgagtttgagctgcttcgttcttactactagttttctgctcagattcggaaacatttttatcatcattttctgttttagatactacttcacttttattctcttgagaagtattaccttcatccgcatgcacaatagtactattcatcatcaataatactgctgggctcaacattaacattaatatttttttcttattcatagatcttcctccgtattttttataactaagaaaaatatatcaattatcagctatctttttggttatcagacttattcagtacactttttgaccaaatcagttatcaaaataattggaatttgattctaactaaaaaagagcttttcagctccttttaattttggttaagaattttatccttaaaatattcaaaatatgtactcttacctgtaataatagttgcgttgccttccatcccatatttcaaatttttcttggacttggccttacagattacttcatagacattatttccgcgtagattaatgggatatactccaatttctttcacttttcctactaatctatccattgttccactagcattagctacctgaaaatacagtgtttggcctttttttattgccccaattttattacctgggaaataagtaactacattgaccgttcttttagccttaatcatcggaaacaagtgaactgtattctcctgtttatcatcaagatgaactagccatttttctctatttcttctaacaatttgtccttcatgatagtttctattggcaatattaagtgtattttgtggttctacaattccggtagatgtaactgtactttgtctagttgcaaagaaagaaccgactattaagatcagaactaaaattgccataggaataataatcatagttgaaaaattcttgaatttataggaatagtattcggtactctcatagtctttattattcataacgttgctcctaattctcaactaagttatagtaaaagccatgtttctgcattaatttctcatgacttccttgctcaacaatttgaccatgatctacaaccacaatattgttagtcctttgtgcaattgctaaacgatgagcaataaaaataatcgttttatcttttaatttcattaaattatctactacttttttctctgtaatcgtatcaagcccgctagtggcttcatcaaaaattaaaattttagccggtgacaataatgcacgtgcaatagttagcctttgcttttgcccaccggataaaatcttggcattttcatccatcttggtttcaaactgcagtggtaattgttcgatttcagactcaatttctgctatctgacaggctttcaatatatctttttctgtaatatctggtcgactacctaagagcagattttctttgattgttcctgagaagatgtatggtgtttggggaacatagtttacgtatgaccgtaagacatgcttatctactttagtagaattaaatccattaaaagttaacttgcctttgcttggagagaagaaatcaactaaaagtttgaccatagtagacttacctgagccactcatccctacgattgccaacttatcattgggttcgatttttaaattaatactgaaaattgaaagcaccaaaatcaagctcaagtcctgtcactattgagctttcttagacgtaattagtttttatatgatctgtttcagtgcaatttgtatgaatcgtggcagttggttaataaagtcattgattacttcatctatcttttcaaaactattctgtttaagctcttttaattctgaaattaagtagaccaatgcatctacgaatctaatatcaggtaaggattcgttcattagatagaataaatctccgattgtcttatcatctgtattttgtctttcctgccaggtcaatagatcataagttattgctgtaactgcgatatagccacattggccatcatagctttgaacttgagatttatctaaagcaagatattgcttagacgtcttaaaatatgtttcaatttgccatctacgaccataaagttggatgatttcttcagggctaagctttgtctgagtagtagctaaaaccaaatacttgttcttgtttccacggttggagacaaagacgagctttaataaaaagctatgtccatgatattgagcctcaactatgcttgaataaagataatgtttctttttacggatgtttgaagcagccaaacgatcatacaagtctttaacgctatagcggcgatggcgataaatgtaataaatctttgaactcttcttgatcatgccaagtccatctaaaccgatcttctttaaaatccaaaacattcttggagaagaaaaccaagaatcgaataagacgtatttagcttctactcctaatcgtaaggcttgtctaatcaactctacagttacatcattcatctttctctgagcttgatttctccttttaccagaaattgaacgttcatcagcagtaatgggagcagctccaatcatatttttcttggttttggttgacatcaaggcaaagttaaccggcaagaaggtattgccatcgctccagcctaaagttaaaccacgatatccgttcaaatactcatgcttgtcatggtcatagactttagctagcaattcggtctttttagaaaaagaccgagccatcagcgtatcgtcaacgataaaagcaagtcggcgtcttttatcgataaatggttttaagcagccaatgagccgggctgcaatcaagcataatagtttttgccagttgattcttccatcgttaagtacattgcgagcagttctaacggaaaaacgtttgtcatccttagctctgaataaagaaagccgagcaaaatgtactgacatcagccaagagataatcatggttaatgaaacggtggatttacgcttaaaattgacttgtttagttaacttagctagaccaattagattaataaatgaagaaattaaggatttagtatcattttctgtgtcgatttgttctatactgttcattgcgcaggatctcctttactttttaggtcgacacttaaagtataacgcagagagagcctgcgtttttatttttgataagaaaaagccaagaggcgcggggaaggagcgttaatcttagctttcaagtttcagattaatatctttcccggatttaaaattgaagtgcaacactaagtgttaaacaaaaaggccatgaagacctaaacttgaagtgacgaaaaatcaagaaaggaagatcttcatgaccaattcaaattctagcatttctaagcactatcatcaattaaccagcgtacaacgtggacaaattcaagcaatgctggattccggcataacttcccgtactgttatcgctcaagaagttggctgccataagtcgacaatcagtcgcgaaatcaaacgcggaagcgtcctgcaaagagacagcagctatttattgtatgagcactattacgctgatactgcacagatttattatgagaagcgtcgcaaaaactgctatcagcgcaatccattgaagcattatgctgtctttttgagaatgctctccagacgctttaaagctaaatttgatgccaccagcatcgatgagttcgttggtgaattcaaaaggactatgccaggctacccttgtcccagcacaccaaccgtctatcgctatattgatcagggcttgctggacataagcaatattgatctgcctatgaagctcaaaagacgcaggaacaagcgtcatcacagccatggcggtcacgctttgcacaagaagcatcttggcaattccattgaacagcgtcctaaagagattgaagacagaaaagctccgctgcactgggaaggagatctggttaaaggcgtcagacgcaagaatcagcctgctttaatgactttgactgaaagaaccacacgctttgaagtagttatcaagattcctgactatcgggcaagcacatgccaaaggctgcttcaaaaggagattgacagacatcctgcctggtttaaatcaatcacgtttgacaatggctctgagtttgcggatatgaccaagatcaagggctgccagatttactttgctcacccatattctccatgggaaaggggcaccaatgagaactgcaatggtcttttgcgtcaattcttccctaagggcaagagcatgaaagacaagtcaaaagcttatgttcaacaggcaactgatgccattaaccacaaatatcgccgaatcctccaatatcacacagcagaggaactcttcaagcaatatatctcttcataacctaactgttgcacttaatttgacaattcaggaattaatatcttttaatacatcgactccatagccataatgatagtcaacatgatgatattcaatctcacctgctaattgcttggcatccctaatctgagcatctttctggaactcactcttaaccatgtatacttcattcaatcgattttgtgctacattagctgattgtagagttggttgaagattaataatgctctgaagtggatctacaaaatacgatagtaatgcgttgaaggtcattaattgaccaatgctcatctgcccgttcattacaaccttagcccctacccagaggataattacattgagagataactgaatgaaggtctttaaagctgactgcaaagattcagttttactgtaacgaaaagatttcttgaggtaatcgacgaattgactatcaatcttacgataacgtgtttgttcgctatttaaagctttgattgtttcaattccttgaatatcttcaattactgaagaacttaagacagcattactctccatctgatcattattcatcttttcaaatttcttagaaaagctaagaatcaccactgcataaattggcaaagacagtagagtaatcacaaatagagtggaattttgaattgccaaaactattcccatcacaattacaattgaaagatcaagaaataatgaaataactgtactggcgagtgcgtcaataattcgactagcatcagagaaccttgaggtaatttcccctgttctacgagttacgaagaattccattggtaattcaaaaatatggcgaatgtattgtaagttaagatcaatacttaatcgctgacctagaacatccaatagaaaattttgcccgtaagaaaagatagagttgaaaacatatgctatcaataaaccaatagctaggatcgacaaagtttggtatgtaccgctaggaatataagtatcaattaagccttgcaagaagtatgagctacaaatactaatgattgtcatcaaaagagcagccaaaataatattagtgactagtttcttttgtttgaacatgtatggaaatagtgaccacagattttgctttttctctttgagtggctcaaaatcatcatttgggaccataaaaagggcaattcccgtccattcttgagaaaacttttctttagacattttcgttaaaccaacgctaggatccggatcagcaatcactaaataatttttggttgccttaatcacaacataatagtggagtaattcgccttgctttaagacgtgtacgatgaaaggatattgaatgtctgcatcaggatcaaacaaggacatgtcagctttaactgcttcagtttttagattaaatgcttgtgctgttttaactaagcccagagcggtagtcccttctaaattagtgcgggctgaatgacgtaaatgggctaaaaatactctagaatgatattttttaagaatcatagctaagcatgcaactccacaatctgattcgtctacttgtggtacataaattgatttatactgtagtaacatcttttccactcctcatattaagttgaatccattatttcatgattggaaaactaaatgtaaaaaaataccaaatcggttattctcattaccgattcggtattttagttttctaactagattgagctactcaactttaatattttcaaatttatctacaagctttttaaccacggctttatacgatctagaataagttaccatctgaccattatcaaatataataatgcgttccttcgtgtcaattgcactaatgttcttaggatttaccaaagaagattgcgaaacttttgccaagaatgggttttctttatcaatctgagtaatatttgccttatactcaacttctccattctcagtaaccatatgtactttatgctgtgtagtactgtgttcaatgaaaagtatatcgccttcggccactttacatacgcgccgaccaatcttataagtaaagtcacgttgactaaacttaattctgttagataaattatcgaaggcgttacgtaacgtttcttcgatacgttgaataatcttatcagacgacatagacttactaatataatcaattgcaccgatacgacggcgatacgttaatggagcgtacttatcgtacgccgttacgaagatgatctgggcattttcgtcattcttcttgatgaattcagctaaatctacgccattcttagctttagactctcgacttaattcaatatctaagaagtagataccattcttaatatcatttgtgactatgtatcctaccgcttgagcaaaatcgttagcaacaaacgtaacagattcatttaattcagcgtaaccttcattatcatctattaagtcttgaatagatgcattgatattcttagcaatctgattagctaaatctttatcgtcatcgcatacaatgattgggaacttactcatcctcttcaccatcttccgtatcaattgtcatataaaagtcgaaccagccgtcttgaattgtataagaaatagacatatcaggatatttactctcaatttccttaatattagctaatccaagccctttatggtctttcttagtagtaaagccacgttgttgaatttgactagttgagatatttttattttggattttatttctgatttcgaactcaaattcatctgggtcatcagaatagaccattatttggacttcagcacttcgaatatcatgcttttcggcaatcaatgctttactttcctcaattgcattatcgaaagtaatgccaataatacgtactagatcgagttcatctacatggtctggtaaattacggatattatttcgacattcaaaattatatggtatatccaaattatacaattctgttatctttggaataataatgctcttaattgatttaacgtaaatgtgatttaggtctttatatttaagtaaggctttagaatttaggttagtttcagtatatttatctagtttctgaattacttcttgaacgttaccttcttgcgcacttacctttaaagaattaagaatatttttgtaatcatgtctgaaggcgcgaagatcatcttcacttttttcaagataagaagcatattcttcaagctgatgctgctgttgctttaatttttcttgatcctttttatttaaaagtttttcttgtaccatcgtcatttcatgatatataaatatagcaaaaatagtttggataagaatatagagagaaaagaacaaagttaatggtgtaaaagatttgctttgaatatatatgatagagatgctcaccgtagaaacataggtataagctaatatgcctacgaaaattttattattttggtttgctagataattatatatttttccattacctagttttattgcaactatcatcattagtattagtaagaaacgtagtgataattggcctatcaaagtaaatgacataacctgagtgatcatatcagacacaatatcaactaataaatctaatgtgcatactaatattattgaaccaaatagtatttctaatgtattattttttctcaaatataatacaaaaagcaaagtttcgaaactgtcaaatcttttgtgtaaatagttctttctcgtaaattgattttttaattatttatttaatcaaagtaggattctaaggtgtcctgaacctgaccaaagcctttatgaattcgattgaaataacggtcattgtagctcattgcctgaataccaataaaagcatcaagcgactgttcagttggaaactctgccttaggcttagctttgcgcttgatcacattgttaaatgattcaatcatgttagtcgaataaattgaagctctgatctgcttgggatagttataaaagaccagcagatctggttctatgtctttcaagcttctgataacatggctgtaaaccttgccccatttggtatagaagtcatgcaggacagctgtggcttcttctttgtttgtctgttgatgcacctgtttgaattcgttcatgatcttttcacgatcgtcgacgcgtactttagcgcagatattgcgcatgacatgaaccaaacagcgttgaaaatgagctttaggataagtcctggccaaggctgttttcatgccaacaacaccatcagaaagaaagagttcaacttgcttcaagcctctggacttcatgttttgaagcatctctgtccagacttcaatgttctcactaggagcaatgcagtagtcaatgacttccttatgtccattaggtttaatgccaatggcaatatagactgcttcacgctcaaacgtttctcggcgcaaaggaaggtatgtcgcatccaaatagacgcagaaaaacttgtcgcttagcttgcgtttgtggtaagcctcaacctttggaatcatctgcttggaaatatttgatacctgagctggactgtaatggctgccatacatcttttcaattagatcggctatttccctggtggtcacgcccttggagtaaagcttgataatcatgctttccaagatatccgagtgctgcttgtagtcaggcagcgtgtgctgatgaaattgaccgttgcgatcccgaggcacttgcacttcaattgggccaaattgcgtatcaactttgcggaaataagcaccatttctagagttgccagtattccagccatttctggcatagggatcatagcccagaaaggcagtcaattcagcttctagcaagttattaacagcctgttgtagttctttgcgcaataaatcatttattttgtctggattgaatagagcttgagcaaaatctttggtaaaatcattcatgaaggagttcttctttctgtatgtgttttttttgttcaaaccaatcatacgagaaaggaactcctttttctaatgtttaaagaaataaatttaaggaatcattcatccttacacaaactattttacagtctcaaagtttcaagtatatttgtgaagattacgccaatattacctatagacaataacaaccctaaaaaaatattagcaatacacaaaaatagaatctgtctctttttagatcttactcttgatatttaaaaaaaacaccatacatctgctaaactagaaaaaacattaagaaaaagaaataagactatcttttccatatattattccaaagttttttactcaagaaattaaaaccaacatgtgccgtgcttccaccaacaaccttagtcaattcttcttccttcaaaacagtctttttaacattttgcttcttcatgatatttcatcctttcatgattttatactcaacttgtttacacctttaatatatcatgtacttttaagtaaattaaaaaagataccaattcagtcatactttcgtaccgatccggtttcatatttcttcaaacgtaaacaactgacaattaattttcttagctaattcctgacagctatccgtaaagccagatttggaaaatagataataatgcttaagtggatacttgaagatttcactatttgtaatcaatttttctaacacactacgagagatcggttcattcttccatttacattcgccgaaatatccatcacgttcatcgtcagagaatcctacaatatctaactcaacttgttgatgtgttctcttatcggttccccaccaattgcccaagtggataaacggattaggaacaattttttcattcatatcctgagaccacatgaagtcttgactgtatttttcaaactcaggtcccatgaaatcagatagacccttttgtacttttacccaagcaagatcagttaagccacgctcaattagatcggtttgcttgccaacaaaggtataccagaagcggaacatcccgtcacagatacgataaacgatatttttgcttttactcttcttttgctcagtaaccggtaactttttctcaacaatacctaaatctatcaaattattcaggtacgtggttagcggaccagtttgtaagtgggcggattgcgcaattttactatgcttagaagcacctgaagctatcgcattgataatcgaattatagttagttggatcgcgtaattcctgttgtaacaagttattaggctcatcaaataagcgacctgatttactcaaaaagtttttcttaatattatccgcaactgacatgctgtctgacatataactcaaatattggggtacaccgccacaaaccgtattgatgataaaagcgtcctctttactgagttttggtaacatttcatgtgcttctgataatttaaatggttcaagctttaaggctaaagtgcgacgaccatatagtggactttggtagcctaagacttgtcgttccataaatgacatcgatgaaccacataaaatcaaaaataggttagtttctttgaattcatgatcaatgtaggattgcaacattgaactaattgtagggtaagccttagccaaataaggaaattcgtcaataactaaaattacacgttgtttttgagctaggtgtgtaatttctttaaagcattcctcaaaatttgcaaatttttcttttccaccctgatctgtatttttaaaaatactaattgcatcagaaaaacgttttagattatcttccgcattttcttcaagtgctacataataaattgactttttatcttttaaaaactcattgatcagtgaagtctttccaattcttcttcgaccatagatcactgtaaattgaaaatcattttcttgatacgcctgattcaattgctctaattcttgatgtctacctacaaacatagcgcactccttttcactacatcgtaatatactacattatattatactataacacgatatagtataacgtaatgtacgtgtattctatttttgtaataaaaatggccgttacttagagaaatagcgaagatcattaaattttaacatgctataataacaatagaacaagaataaaaagttttagcgtgcgcgttgaggtagctcctcaacttagtcattaacgtgtggctctgctttggcaaagcttttttgttatgttaataccctacaaaaaagaccgtgcatccctgcacggtcttttcatcttatcacatctattttctaacgtattcgccgttcttgtacttaaattcaatcttcttgttaggcaattgaaccgtaattctgcgatatacaggaccgaagccgtgcttttcaagcttaactttcacgctaccgtccttgtttaccttaaccttgtacaagttgtattcgcccttttggtacttaaagtcagttccgttatcttgatagtgaacgtacttaccctttttaccaaatagtctaaaggtcatactctcgtctggttcaccagagatgtggctaacttctttaccccatggcaagatagtgttcttcttgataaacagtggcaacttgccaattggtgcatcaaccaaaatcgtggtctttccagcatgttcaacaccattccagaaatcaatccattttccttttggcaaatatacggcacgcttggtttgaccttcttgaacaactggggctgccaaaatgtcctcgcctaccatatattcatcattcaagttatacacctgtggatcattttcataattaaggacaagtggacgcataattggcaaacctgtcttagtttcacgatagaattcatcgtaaagatatggaatgaaacggtaacgcagcttcaagtacttacggtaaattgacaaggttggttcgccaaatatccatggttcttgtgagcgagttcctagagccgcatggtttctgtacaatggactaaacaatgcgccttcgatccaacgagtcaacaattcaggtgttgtgtcagcaccaaagccaccgatatcagtaccggcaaagctgaatccactcatacctaagttacataattgtggaatcatcatttggacatgtgtccataaactttggttgtcaccagtccaaactgtggaaaacttttgcgttcctgcatatgctgcacgcgtaatgacaaatgggcgttttccactgaatttcttcaaaccttcataagttgccttagccatgttatgaccatagacattgtgcatcttcttatgagttgaagcttcttcttcattatggaagacgatattttgtggaatttcacccttgaaggatgcaggttcattcatatcgtcccagatacctgaaacaccaaggtcaactaagtacttgcagttcttagcccaccacttacgtacttctttgcggccaaagtctgggaagactgaatcgccaggccaaacttggtttacataaacagtgccatctggagcctttacgaagtagcccttttcgataccttccttgtagatcttatagtcatcatctttcttaacgccagggtcaataatcgtgattattctgaagcccaatttacgcatcttagctacgaatttctctggtgactcatagttatcttttctccaggtaaatactctgtagccgcgcatataatcgatatccaggtgtaaaacgtcacatggtaagtcatacttacgcaagttttcagcaatcttctcaacttgcttttgactgacactgtagccccaacgtgattgttgatagcccaaagtccacttttgtggcattggtacacgaccagttaaataagtgtagttagtaataacttccttgagtgagtcaccaccgatgatgtagtagtcaatattgccatcaaccgctgagtagtagtaatagtcattactttccttacctaagtcgatgtggttgcgataagtattgtcaaaaaagataccgtaaggatgaccattttttaatcctaataaaattggaatcgacttatacaaacgggtaaagctctctacttgcggatcaggattgtcagtattccaattatcataagcatagtggcgtttgttcaaatagccggttttatcacccaagccataaaattcttcgtcatctgctagtgacttgaccacttcataataatcggcgtcatgctttcccagtaatttatccacatcatggccttcagattcagccagcttcaaatgttcctcatccatctgtcggtcaattggggttcttttcccccgataatctacgaccaatggattgccttgttcatcaaagacgtcaattttttcatcatcataagcttttactatcaacttagccgtagctatttcaatatgatcgcctttatttttaactgtaaaatcagttttaatttctttatcgccttcgatagcataagaattgctagcattacctcgatcttgaaagaatcgcataatttccggtgttaacacggtcaaaatcattggtccattctcatagtttaaggtaattttttgtccatctttagtaaaatcagtaagttgattaatcataatttacctctaaaaaatcaaaagttatgtattcgctttcaattttaacacaataagctaatcaattgggtcataccagaaaaaacaccttcagaaatttttgtatttaaatacaaaaaaactgccttacggcagttttatttaatttattccattggaaaaatcttatctggattcaaaacataatttggatcaaaaacatgcttgatctttctcaaaagttcagtgtaatcatgaccatagaaatcctcaaaccaatctttgcaggcataaccaataccatgctcgccagacatatttccatccaaagctttagctgtcttataaagttcggtaatcacataatgactcttttgctcaaactcttcgtcactcattgcatctgagcaaagataaatatgtaaattaccatcgccggcatgaccaaagttaggaattcgcataccaacctcttgttccaattcatcaactctatgcaaaacatcaggaatatgattaattggcacacaaatatcaacttcatccatctttggcgtagacttttgaatagccaaaagcaatgcttcccgacaagtccaaatcttctttgcttcctctgaattagcatctaaaattaccgcatcagctgctttaaacttcttcgttgctgcaagggcaagctttaattccgcatccaattcctctttagttaaagaatcaagccctagaataatgaagccatcgccatttgcaatcgggaatttttcatcgtaatacttttcccagagactaatgacttttctacccataaattcaacggttgttggcactacaccagaagccaaaattgctggtactgatttaattgctttatccaaattaggaaacggaataattgcattgatcgattgtttaggacgtggatataaacgcatggtaacttcagttactacacctaaagtcccttctgagccaatgatcaggtcttttaacgaataacctgatgaggacttaactgccttagcgccaaatttgtaaagtttaccatcagttaaaacaaccttcaattcgcggatatgttctcgagtaacgccatatttaattgctttcaacccaccggcgttagtatccacattaccaccaattgtagcccaatgcattgctggagctggcatataagtaaatggtttattggctaaatattcttcaatatctttcaaccgaatacctgcttgcacagtcatcgttagactttctggctcgtattccaaaaccttattcattttcaccatatccagtgaaatgccaccttcaacggttaaattgccacccattagaccagtcgaattaccacgcggaacgataggaatatgatgatcgcttgcatatttaacaacgttttcgacttcttcattagtttcaggttgaattaccaagtaaggcattgctctaaccgtcttaaattggtcatgatcccaatgaacagttggcttagtaatgaatcgctctggatctgagataaatttactcaaattatctatatctgttgcagttaattttttaaagtccatctttgacacttctttccaaattgaaacatcctatattaactaatgtatccgcttttgtaagcggtgtcaaaaacaagaactgaagatttttttatctaaaaaagcaaatttccatactacctcactttaaaatgcgatagtatcgactttcatttaaataactattacacaaaatatgaaaataaaaaaactgccttacgacagtttctagttaaataaatccgacatcttagttggaatattattgtttttcacaaaatactttttaaaagtaggtaaatctgcattttcttttttcacatacatatcatgtaaagcccaaaatgcagtgattaacaaattaacgcccaagacaattaacataccgattaaaatatatactaagtaaagcattgatctatcccccgctatatcgtcacttgacccagagtcgcatcttcaatgaagtatctgacgaaagcttgattgaagctcatgccctggccgttgtaaacatgccactcttcgcgtttggcacctacagttctaatgattgaaattactgtgcaaattaccaaatatgcgattagcacgttaaaaattattttcattaccagcatgtctacacttcctctctgtactactcaactaatacactaatatttattagtcaatttgtcaacatcttttagtatttacttttttctccccaggtataaaaagccatagatagctggtccgatcactaccgccccagctatagaaactataatcactgcaataaagcgaggcatagcaaaaaattccgagctaaatttcatacaggcccaggccccaaagaaaaaaatcgcccagccaattaaaattgaaattagcatatttaaacctgaaaatttaggtttagagtttttattgttcatcaagttttctctttcataaaaatattgtgccacaaattgaaggtcaataaacaaaagtgacagattcggtcgttttttagacttatttggtaaaaaataagggagattaagtaaaatatggcgcttaatctcccttttgaatcaataattatttgcccataagacctgaaaaagccattcctaaggcagcaccaccacatgcacctgctttagctgatacgggacgagcataactagtaattgcataatgaaacttcatcacatcatgtgacaatttaccctgccagcttaatggatcaagaccaactcgaattaagttgcagacataattagctgattcaccattttctaactcatgctttgcatcaagtaggatttttctttcttctggcttagtatcttcatttactagtaggtcagtaatattacttaatagccattgttttaaatcatctttattttcttgatacatttttatccctctttttcgactttttcattaatatcaggatgcatccctacaaccattttagaatctttcatgttcttcatcgattcatttattttaataaaaaactctgcaagtagcagagctttttacctcattgcagagttacttatacatatacttagcacatgcttttttagaatccataccattacgaatcttcaaagctaattcaatcgatacatccgcaataattgattgtgggtcaatcacattgtaaggatgatctggtgccttttcctgagctaacgacaattctgtacatcccagcaagattacgttgcagccataatcatcatgcattttttgcaagatctggtggtacaatttaccatcaaccattcccttttctttaatatcggaataaatgagcttattaaccatcggttgaatttccggaccacctaattctgcctcacggtgaaccgcatgaatttcatccacatacaaatgatcatagattgacccttcagtcgcaatcaagccaattttcttttcttgtgggtatttttcaataaattgatgcactgctattctcatcatgtgtaaaaatggaatatcagtcaatgcagccaaatcatcataaaaatagtgagcggtattgcatggcatcacatagaagtctggtcccaatttggcttggcccagaacatcgtcacgtaaatcatagaaaaagtttggtttagtatgatctttaatataagccgttctatcaggaatttgtgcatcattaaccaaaatataatttaaataatcttggtccttagctatttttacacggtgattaattaaacgaacgtagctttctgtggcaatagttcccatgccgccaataatactaaagaagtgtttcactattttcacttactttctaaagtgttcttcttgaccttccaactcattaattacctgctgtgcaaccacaatatcagatggatatggggtatttactccgcgaattttttggaaagcgtcagcccccttaccacagattagcacaacatcatctggcgtagccatggcaatcgcatcatgaatggccttcttacgatctaactcaatagtaacgtcgcacttagagtgatctattcctgaatcaatttcttcggcaatactctttggatcttcaaagcctggatcgtctgtagttaaaaatgctttatctgcgtatgcagtcaaactttcactaaaaccgggacgacgtgacacgcctttatcaccaggagctccaacaacaacaataattttaggatcgttgaattcgttacgcataaatctcattaaagccatcattgaggccttattatgagcgtagtcaactacaaccatgccgtgcttctttgttctctcggtttgcatccggcctggaatagtaacatcgcgaatacccttcgcacattgatcatggttaagtccagccaagcctgctccaataattgcggcagtaccatttgactcgttgaaatcacccagcatctttaaagtataatcaccattaattggtaatttacgtgccttatcactagcacaaactaaattgaaccgagtttctttcatatctaattgttcagaagagaatctgaaatcaattggctgcttcaagtctggattttcaaaattatcgcgggcaaacaaataaatactatcggggttggtagtagttgttgcggcagcgtagacttcatcaaagtgtgcagtttcagcgttgataatacatttacgtgagttaacaagcaattgtaatttgcagtgcaaataatctgcaaaattagggtgttcgttaggaccaatatggtctggactaatattcaggaaaaagcctaaatcataagttaaaccgaagacacgatttttcttatatgcttgactagaaacttccattaccaagtgagtcatgccattatcaacagccgttctcatgtctcggaataagtccaaactctctggtgtggtcaagcttgacttaaagctatcttcaggcttaggaccgaccacatcattaactgaagaaatcagagctgtcttaccaccatttgcttgatcaagcatccctttcaaaaagtatgctgatgtagtctttccctttgtaccagtgaaagctacaacaaacaagtcatcttgtggaaaacggaagaaagcagctgacaaaagagccattgccttagaaacatcgcgcacaattaaagcgtgcattccttttccttctggatatggttgttcagctacataacaaatggccccattgtctttagccattgacaaataagttggtctaaagcctgctcccttgcagaagaacaatgtattagtttgaatatcgcgtgagtcataagacacatagtccattttagtagctactgtatcttgcactgcgcttgacttgagcaagtgatgctcttttaagatcaatatacaggtatttaaggaaatactcattaacttttctcctcgttgtatttaaaacatttcagtcaaaattataacacagctagtgtgttggtgacgctttcttcggatcaagtggcaaacgaataataaaactagtccacttttcgtttgattcacagcgaattgtaccatggtgtaaatcaaccacacctttggtgatagataatcccagaccagttccgcctgtcttagtatttcgcgaagtttctacccggtaaaaacgctcaaagattttatttaatgatttcttcggaattggtgccccattattttcaacgcgcaactctacttcacgtttgttgactaaattggctaccaatttaattttagttgcccctgtaccatacttgaaagcattagaaatcaaattattgtaaacgcggaccagcttttccgcatcagccttaatcgttagattctttggccgcgcttcaatctctatttcaatgccatttttttctgcttctaattcaaagccggccgctacctgctccaacattgaataaatatgcaaatcattcagatttaacttagtattggtcgactttaaagtagtatattcaaacagatcgttagccagtgctttcatttgttctgccttagtataggcaatattgacatactttttctgatcttctggcgaagtcactcctgcttttaacaaaccaagataaccaataattgatgttagcggcgttctgatatcgtgcgaaacattagtgatcaattcatccttagattgctcaattgcccgttcttcattaatcgaatttacagtactatcaaccaacgaattaatcgaatccactactcgttgcaattctggtcgtacccgaaaattaatccgatgatcaaaatgaccattagcaatatagtgaagttccaaaataatgtgacgtagctgcatttggtgatagcgtcgaatcaagcgccagtacaaaacaaccaagtcgcccactcccattaagacgatgaatacgttttgccaggaccagagatgatagccacctgcaaaagtgatcgtcttttttagaaagtagattccgttgaccaggctttcatcctgcaaaatagctaagtgaatcagaatgataattgataaatttaataaaaacagaaggacgaccgttacgaccccttctgcaaacaattcgctcttttcggcgccagttagcttgacgcgttcttttttcatcttatgcctcgaccttgtaacctacgccccaaacagtttggatgacatcctcaccatcagtggctttttgaattttatcacgaaggtgtgacacgtgtaccatgacagttttagctgaaacaattgattcttgttgccaaacacgttcaaagatttcatcagctgaaaaaacacggttagggtgactagcaagtaagtataagataccgaattctaaggcagttaattggatagtcttaccatcaatagtcttaacttcatgtgaatcacggttaattaccaatggtcctacttccaaaatatctggtttttcattcttaacttgcttttgacttcttctcaaaagtgaacgtacacgagccattacttcaagtggattgaatggcttagaaacatagtcatcagcaccagtgattaagccttgaatcttgtccatatcaccggttttagcagaaacaataataattggaatatcggagtcttttctaacttccttaattacatcgattcctgacatatttggcatcatcacatccaaaatcatcaaaacgatatctggcgtagtggtcaatttagtaattgcttccttaccactatatgccgcaacaggttcatatccttcatttttaaggtagatacttaatagttctacgatttctttgtcatcatcaacaactaaaattttcacgaggaatgttcccccttcttgtttattattctctgtttttctatctacagtttagcagatatcatatagaatattttacacattttagaaaaatatactgctttcattatcctttttaaacaaaagctaaaaaaatacacgtttctccatcatgaaaaacgtgtattcattctatttactttaccttatcatcatgcaatttagtttcgacataaacgcagacgataaatagcaaagcaaaacagcagatcttaggtgctgttgcataatcaagcatgctagcaaaaccgaataagataccatctggaacaacccaccaggagccgatcgaagaattaaaggtatcactaactgtcgcaaagaatgcaattaaaatcgttaaaacaagtaaaactgaagttaagatcattcccggccgaccaaaatctttaaaaccatgatcccagtagactatcactccaagcagtaccaataagattgataccagccatagactaccctttttcataataaaggccttctttctgcccttatcctaacacgattaagtagcagctgccttgtttaacgcttattgaatttccttcttgccagtgtagagttcatagtagtaacccttttgcttgattaattcatcatggttaccatgttcaataatatgaccatgatcaagtaccaagattaaatctgagttaacaatcgttgacagacggtgagcaataacaaaactagttctaccagtaagcaagttgtccatcccggcttgaaccattttttcagttcgagtatcaatacttgaggtagcttcatcaagaatcattactggctcatcagcaatcattgcccgcgcaattgacaacagctgtatttgcccttgtgaaaggtcgccgccatcaccatcaatcacagtttcataaccgtgatcaaggtcatggataaattcatctgcgtgtgataacttggctgcttgataaacatcgtcatcactggcatctggattaccaaagcggatattgtccataattgtgccagtaaagagatgggtttcctgtaaaacaattgaaagtgattttctcaaatcatcttttttaatgtttttaattggaataccgtcataagtaatcgttcctgaatcaatatcgtagaaacggttaagcatgttagagatggttgtcttacctgcaccggtttcaccaactaaagctaccttcattcccggtttggcattaatggaaatgtcatgcaagatttgatgatctggtacgtagctaaagttaacatgatcaaaaataatatgaccacgaacttgaaccttcttggttgagccatctttttgtggtacattccagtaccacttactgccgacttcatcgtttttcttagaaagagtaactgtaccttggtcagcttctgacttttgatcttccaagttgaaaattctttctgcaccagctaaagccattacaatagagtttaattgttgcgaaatttgggcaattggcatactgaattgcttagataactgtaagaatgaaccaatggcaccaagtgaaagcggagcccaactattaattgcagcagcaccaccaacaaaggcgatcaaaacgtaaagcaagttacccatgttacccataattgggaataaaattgtagcgtaagtgttagccttacctgaggcttgacgcaactcatcattatatttgtcaaagccttccttagattgtggctcatggctgaagaccttgatgaccttcaaaccattaagcatttcttcattataaccattgatttggcccagcttcttttgttggacttggaagaagtgacttgatctaaccgttaagtagcgcacaattccaaatgataaagcaaaaataatgaaggagaacacagtcaattgccaactaagtgaaaacatagcaactactacaaataataaactcaaagctgagttagtaaattgtggaattgactgtgaaatcatctgcatcaaggtatcaatatcgttagtataacgcgacatgatatcaccaaattcattttggtcaaagtatgaaattggcaagctttccatgtgaacaaacatttcgttacgtacacgatattgcactttttgagctaaaacacccatcagcatgttaaaaaggtaattagacaaaaaaccaatcgcatagatcccaaacattaccgcaattgcagtagctagagggccatagttaggaactttttctttagttaaaggcacaatataattattgatcaaacgttcaatgaataacgagccaataacgttgctggcagctgctagcacaatagtgatcatggaaacgatgagcatccatggacttgtactattaaccagtttcaataggcgcaataagattttggttctgctaccctttgtttgatttttacttttttccattgcttgatccaaattgctcacctactttccttgttcttcctggaatttagcgattgaactataaagttcgttagtcttcatcaattcatcgtgggttccgatagcttgaatttgaccatgatccatgacgataatccgatcagcatccttaattgaaacaattctttgtgaaataatgattttagtagtttctggcatatctttagccaaagacgttctaatttgtcgctcagtactggtatcaacagctgaagtggagtcatctaagatcaagatcttcggattcttaagcaaggctctggcaatagtaattctttgcttttgcccaccagaaacgttgttaccaccttgttccaccattgtgtcataaccatctggcatttcacgaataaagccatcagcatgggcgattttagcagcggcaattacttgttcatcggttgcattttcgttaccccacttgaggttatccttaatcgttcctgtgaacagcacattcttttgtaaaaccatcgcaacgttatcacgcaaggtcttcaagtcatatgacttaacgttgtgtcctgcaacccgaacggcaccagaagtaacatcataaagacgcggaatcattgaaaccaaggttgacttcgatgaacctgtttcaccaataatcccgattgtttcacctggcctaatgtgcaaattgatatcttttaaagcatcagccttgtccgcaggttcgtacttaaagctaacgtgatcaaagataatttcaccattggtcaaacgtttcaatggcttcttaggatcttcaattgttggttcttccgtaatcactgaccactggcacctgagataaccaattgcgtagtaatcatagctaaaatgtttaaactaaacaaaactgagtttgaataagtaaacattgaaattaattgaccagtttgtaaactaccgccaaccacttcttttgcaccgaaccagcagattgacagcgttgaaatattcaaaacagctgcaactactaatgcgttcaaagacataatcttttgtgcagtcgcaaacaacttgtaaataaagcctgatgacttcttgaattctttaatctgcggttgttcttggacataggtcttaacttcacgaataccacgtacgttttcacgcacaacctggttcattcggtcataccctctaaaaatcttaggaaagtatggataagctgttttaataatcaaacccaaagcaattgcaaaaaccggtcctaaaactgcaaagattaatgataaacgcggactaataataattgacataataattaaaacgatgaacatcattggtgctctaacagcaattctgatgatcatttgatatgccatttgcacgttgttaacgtcagtagtcaaacgtgtaactaaactggcacttgaaaagtgatcaatattttcaaaagaatagtcctgcatatggtagaacatgtcttggcgcaagtttgcggcaaaaccagcagctgcatgagctgagacataactcgcactagcgcctaaaattagcgaaataacggttaacactaatagcaatagccccattttactaatataggacatatcccccttcataattccgttatcaatcaaaattccgaccaaatatggaatcagcatttcaatgataacttcaccaataacaaacattggtgagagcaaagacaattttttatattgcctaattgatttgctcaatgttttgatcatagagacccacccttctattcttttattcaatctcgcaaataaaaagataaatggatcatctccatttatcttttttatctatattaagtttaagtatgtgcttatttttacggaaattcaattaacatgcttgcaaaacaggtaaattatttatgttgttgtggccttggtgcaaatgcggaaccaacaatattgtagtgctttctgaataaataacgtacaccataggcagccgccgcgataacgatgtcagctactgctggtaaaactgggttgattacgcgcaatgctgggatttgcaaaatccacatccagacaaacaaaacaactgctatagccaacattcttaagatcagcttaaccaatgaaggacgtttaccttgctgaggcattagccaatcattgtatttaaccatgaagatccccattaaaatacctacactggcaattgtcagaatccccatttgtgaattatacggttggttcttagtttggaataatgcaaggataccacataaaccaacaaaaattgctaaataaagcaatgcgccatcaaccatcaactgccaagttggtgtagccactggctttttcttaggatgaagcatttgttcagccttaattgctggtgaagccaggtaaagcccattggctggttgcccatgacgttgggcaataataatttcactgagcaagccattagtcatcgcaactgcatcagcacgtgacattgaaccttgtttttgcagttctttttctagacgaaaaacatagtcactgttcttgttactcaacttttcacgcaaagcttttggatcttcctgcttaattttttcatcctgagtatcaagctcagcttgcttctttaatttagcttgtttttcagtgttaatttttgtttgatcttgttctctctttgtctcttcagccattcttactcctagacgttaaatctaaattcaataatgtcaccgtcttgaacttcgtaatctttaccttcaagacgcagcttaccagcttctttaaccttttgcatagtttcaagcttgtctaaatcatcaaatgaaacaacttcagctcgaataaaaccacgctcaaagtctgagtgaataacaccagcaacttgtggagctttcatccctttgtggaaagtccaggcacgggtttcaggaccaccggcagtaaagaaagttctaaggcctaagatatgatatgcagcacgaatcaaacgatccaagcctgattcttctacgccttccatctcaaggaattctttcttttcatcatcagccataccagcgatttcttcttcagttgcagcagaaatacctaagcattctgcaccttcgctttcggcatgcttcttaacaatttggtaatacttgtcgctttctggatcagccattgagtcttcagcaatgttagcaacgtagataactggcttggaagttaacaagaacaagcccttaacaatcttttgttcatcttcgttgaagtcgattgaacgagcagcattaccttcttcaagtactggctgcaatttattcaaaacagccatttcagccttggcttccttatcgccttgttgagcaaccttctttaccttattgattctgcggttaacagcatcgaggtccgcaatagcaagttccaagttaatagtattaatatcttcttctggatcaaccttaccagtaactgaggtaatattgtcatcatcaaaggcacgaacaacgtgaacgatggcatcagtttgacggatgttttcaaggaacttgttaccaagaccttcaccttttgaagcacccttaaccaatccagcaatatcggtaaattcaaaagttgtgtgcacaatcttcttagcaggaatcaattcttgaattcttgccaaacgcttgtcaggaacttcaaccattccgacatttggttcaatggtggcaaatggatagttagccatttcggcaccagccttagtaatcgcattaaacaaagttgacttaccaacgtttggtaaaccaacaataccagcagttaatgacatttgttgtcctctttttctaaaatcaattttttatttttacttacttgtctattttatccaaaatttggccgagcgatacgatcttttggcacatattgctctttttttgcattaaccggatcattcgccttagttaatagcttttttagcttccggttaaactcgctgcgcggcatcatgactatgtgcccacaacccatacattttaatttgatatcagcacccatgcgcaaaatttcccaatcattagtctgacaagcatgaggctttttcatttgaactgtatcagccaaattataaacaatttctttagccatctaaatcaacacctaacaaatcaagaatccggttcaattcttcagtcgaagcaaaatcaatcgataaatgacccttacctttttgtgtttctgaaatattgacgctagagccaaacttattagccaattggctttcgctagcccggataaaggccgatttcttgacggtctttttgctgcgaggttttttagcgttcaattcactgactaccgcttcaaccttacgcaccggcatcccttccttgactactcgcttagccagcgcatcaatcttttccttatctttcaaacttaaaagcgttctagcttgtcccatcgacagttcaccatgttggagtaaacgcttagtcttgctaggtaaagtgagcaaacgcaaataattagcaatatatggtcgcgacttacccatccgcttcgaaacttcttcttgcgttaagccaagattcttctgcagcatttcataagcttgcgcctcttcaagtggagttaaatcttcacgctgcaagttttctagaactgccacttccatcatttggctttcgttaaacttgcgaataattgctggaatagtcatcttcttagccaatttagaagcacggaaacgacgctcaccagcaatgatctcatatccattaactgattcgcgcacgataattggctggaaaacaccattttccttaatagaatccgacagttcttttaagctcttatcatcaaatctttttctaggctgataaggattcggccgaatatcgcccaaatcgagttcttggacttcttctgcctcttgaacttgaggctcatcctcaaataaggcttcaagaccacgacctaggccgcccttttttcttggctctttacttcttgagtctcttgtcatgagcttttaacacctcttttgctaaatcatcatataccttggcaccacgagattttggtgcatattctgtaattggctgaccataacttggggcctcagctaatttagtaattcgaggaatgatggtcttataaactttcttgctaaagtaggactgcacttctttaaccacttcagcacccaagttagttctggcatcaagcattgttaacaaaacgccttctacgccaagatctttattaaaatgcttttggactaaacgaattgtgttcaaaagttggctaagtccttccatagcataatattcactctgaactggaatcaaaattgaatcagatgcagtaaaagcattaattgaaagttgccctaatgatggcggacagtcaataaaaacaaaatcgtattgatcgctaattgcatctaaagctgactttaagcgtgtctcccgagccatcattgaaattaattccgtttcagcaccggacaagttgattgtggctggaaccatatctagctttggcgttgaagtatggtgaatagtatcttgaataggaatttcgtcaatcaaaacattgtaaatgtcctggtcaatctctgatttttcaattcctaaaccagaggtagcgttaccttgtggatcaatatccacaattaaaacgcgataaccacggtcggcaattgaggctgctaaattaatggtcgtagtggttttacctacgccacctttttggtttgcaaccgaaattacatttaccatattgttcatccttccctattacttccttttcaattcaattgtgatcttataatcatccggatctttattttctgttactttgactttaattcctgagtcttcggctaacttaaccgccttcttaatggtgttaatttgtacctttaagtctttaggaactcggctaacgacccgcttagcttcttttttagccttaggcttagggttaaagtaaacatccacatcttgcacaatctcttcagtttgtttaacgtttaagccttttgcttcaatttctgtcaaaacgcgatcttgatctgcattacttaagccgatcattgcacgaccatgacgagcggtaattttgccagcaatcaaagcttgctgcacattatcatccagcttcaataagcgcaatttgttagccacataagattgagacttacccatatttttagccaaagcagtttgagtcaaatcatttaattccattaaattagtataagcttttgcctcatcaattggatttaagtcttcacgctgtaagttctcaatcaaggctaatgaagcagcttgatcatcactcatatttttgacgatcgcaggaatagtctgccagcccaagcttttagctgcacgataacgtctttcacctgcaataatctcatattgctcgtcatcgccatcttcacgaactacgataggttggagcaagccatccttatcaagtgtttcagctaattctttaattgaatcatcagaaaattcacgccgtggttgatagcggttaggaaaaatcttgctcaattcaagatcttgaacctgtttattcttaggaatttcatcatcatgatgcataaaagaaaataatgacataatatacccctttctgtttaatgaatcggtttgcgccgcggggtgcctgcttgacgtggatactttttaggtgttgctttgactttttgaactaagattagagttcgttcttcttcgctctcaggtagagtcaattcttcttccttaatcagcttaccgcccagcaattcaagagctttttgaccatcatccaattcatcttcggcttttggtcccttgagggcaataaagtaaccatcttttttcaccaaaggcaagcaatattcactcaaaacactcatccgcgcaaccgcacgagcagtaacgagatcgaacttttctcgataaagcttattttgaccaacgtcttcagcgcggccatgaactaattcgacgtctttcaagtctaacttagtaattaagttctttaaaaaagtcaatcgttttgccaaagaatcaacaatggtaatcttcaattctggctgcaaaatcttgagcggaattgatggaaaaccagcaccagcaccaacatcacaaagagtggcaccatctttaaaaacatcgccaaaagtaaacagcggcgtaatactgtcataaaagtgcttaaggtaaacctcatcttcttcggtaattcgtgtcaaattgacatgctcattaacttcgatcaaataattaaaatatattttaaattgttcaatttgttggtcagttaatttaaaattgtgttttgatagttctaaaataaatttttcaggattcatttttcacccgtgaaaccgtgtttcacacctctaaatttaacgcaaaatgcattgattagtaaagatatttcatcttatcaattatgaagtatttttactcaatcgtcaaagttttgccgcccgcaaaatagggtataataaggcgcaaaggagttaaaaatatgattgttactttaattgttttagcttacttagcatataaaacatatttaggctataaaacaggctttacacgctatatcatcggtttaatctgttccgccattgtctttatggttgccattttcatgcaaaatccatttggtaattggctatacacacaatacactggagaaatgattaagactaactccactaacaacgtggaattaatgattgcacgctttgtcgctttctttattgttttcttcgtgggcaaaatgatcatgaagattgtcaaaagctggattcctaacaaaaatccacatgcgactaacttaggcagtattctcgacaatgtcttgggtgctctagcctccctaattgctagttattttgttgtttatgtagttttgtccatgttcaatgcactacaaaatccatggtttatgcagcaaacaattgattctagctttttgaggtttatcatttacaacacaccggggctttcaaacggtgtcttcaataatatctttaatattggcaaaactgtgggataaaatatatcaaaaaagatctgcttgtatcatactgagcagatctttattgatatgttttaactaaattaatactacatttatgaaccaacattcgatatacttattagcgcaggaagttttatgagcggcggctggttctcccccccggaggtgaggcctatgggctacattgatgaaagggttccagccatgtcggtttacgagagtatctccttgatgcttttgttcggtacatttttgttggctttgctgacatatattgaccaccaccaaaaataaaaaacgccgctcaaacatactttggccagttattgagtagcgtttaacgtaaaatttaacatttgaagccgccgctcttaaagcgggctgcttggagtccctaggactcctttttctttagtcattatagcatatttcactaatcaccgaaattatcatattcaatatgttcatcattataaacaaagattgcaccaattcgatcagggttatcatgccaaccctttagtggcttgccagcaaagaataatcgtttgcattcaatttctgcttcaaccgatgttttggtaaaagtagtcacaccagctaaatcagtctttacaggatacccggttctaggatcaatcaaatgatgatactttttaccgttaactactaagtagcgctcatatgtcccactagtaacggctgagcattcaggcaccataactgacgtaatattgtcgcctcgcggctgtttaggatcttgcacaccaattgaccactggccactaattcttttaggcgaatcaccaactaacaagatattaccgcccagattaataattcctgcttcaacgccatatgcacgccacaagtcacgaattcggtcggcaatccaacccttagcaattccacctaggtccagctccatgcccttcattttaagaaaaacagattggtcactgtcatttaaaaccaccttaaatgggtcagttaacagcattctatctttaatttcttcatctttaggaacatgtgcgcctttaaaaccgatatgccaaagcttaacaactggtccaatcagagcattaaagccaaaattctcacggctcttttctactgccaatttaaccaaaccatacacagcactagagacctgtaccggatgttctccagcagcatgattgatatccattacttcagattcatctcgattaacggtaaaaatatcttcgtaatgatcaattaaatcaaatgatttttgcaatagatcacgattttgagtaccaaaaatctgcaatgtaattgaagttcctaaagcatgatgatcaccaaccacctgctctaatgctaaatctttaatcataattatttctcttccaaatataaatcacgcaacgcctcacgtagttctgtcgttacgccaattttttcttgtaaaaagttatcgaaactaccaaaattctgctcaatagcgattaatgaagtatccaaaaaagcatcagaaactgaacctaaaattcgcatattagcgcgaaaacaaagattctcgccctcttcttgcatttttttatctcttttggcccgatagttattaagcatataatttgagtacaaatagtcctgtctaattgtttccatatctacgccaagcagatataacaagactacagttaccaatccagttctgtcttttccttctgaacaatgataaagtacagcacctttttcagtattggccaacagctctaaaattttatgcaagctatgttgagcgtgttctttcaatacatgtgacttgtaacgctcacacatcattctaaagccagcatactgatcttgacgataagttgcgaatacttgggttaagtctttcttaccgcctttggtgttgtcatcaacagaaattggaatacagaaatgctctacgccagggattttgctgtctggacaatggtcacattcagttggtgaacgcaaatcaataatcttagtcaagccataattgagcaaaaactcttgatcatgtctcgttatgttgctaatcttgcccgttcttaataaccgatgcatcttgaccttacgtccctgatagccaacatatccgcctaaatcacgcggattacaaactttttctaatggcaaaatatttggtttcattaatttcatctctttattaagtattttgataaaaaagccggatagtgtccctatccggtaattttactatcacgtggtaagtcacgcaaaattatttgttagcttgttcaacaaatttaataaagttagccatcatagcatctagttgcttaatataatcttcattggtcaaatcgccagtttctttatcaaaattgcttgcagcaccgccaattaagatttcattgcctggcaaaacattggcactcatgtctggtgaaagcaagatttcacgagcatcttcttgcgcacgactagatccttgaataccgtatgaagtaccaacaactgcagccggcttcatcttcatcacattaggaccagcatgtgaacctaaccattcaagcgcactctttaaggcagctggaattgagtgatcatattctggtgtagccaaaattacaccatccgcattcttaacatcctcgatccacttcttagtaacatcatctggctcatcagttctacagaaaggcttaagttgatcgatttctttaacttcaatatcagcttgctcaccataacgcttagcaataaattttgctaaaaaacgattgaaagaaaatggagcgtttgtaccaacaattgctaaaattttcatttaaataagccccctacttagtaagttgtgcataccaatcatcaacttcatcaaagaagtgattcaaaaacttaagtgtacctgcatcggtcaagtcgcctttatcatcaaattgttttggtgccaaacccatcataaattcgtcaccagcaaagacatgagcactaaaaccaggtgcgcccaaaatgctcttcaagcgagtttgcgaacgagacgcaccttgaggcattggtgaagttgacacaataactactggcttatcatggaatgggtgaacagaactagaaagccattcaagtgcactctttaaggcacttgaaaccgagtgttgctgttctggtgaagcgatcaaaaccatatctgcatcagcaatttttttacctaaagctaatacgctagcaggagcatcaacgccttctttatacataggcaagcccttaacagtcgcaaagtcaaaatcatacttatcgcctaagtccttaataatgactttaagtaatttttcgttaaatgagttatcggcattggagcccgataaagctaataccttcataaaaaccacctttcaaaaatcctcttaattatcattatagactaatgtagtttaatttatgtcattttaattttaataacaacaagaaaaaacgccttcgataatgaaggcgccctctactgaatgaaaagcacaaatgattggtgaaatttctatgccaagttatccttaagcgaagcttcttcgtcggcagcaaacattgggttttcttgagtttcgctgagacgattgttaagcatagcatcgtggatttgagcattcaacacattgacgatttgagtttggctgaagcttgcaatctcattaacaatcaatgcagccatacctgtagtagaaatccagttagcaattacgatgtcatgaatcttttgatcatcataatcaacatcaggatattgttccttgaacttttcagttccaagttccatcaaagtgtcagcaatgatcttgctaccaaacttgccatcaacgaacattgctctaaacaagttaacatgagcttgagcaaaatcaatgtatgacaaatccaagtcaattaaaggttcaccaacgtacttttgttgtaaagtatgagttctcaagtcattagagattcttctcaaaacttgattgcgaagatcatccatgttgttaaattctagatacaaaggttgggttgagaagtgtcctgctttagcaatgctacgagcagtcaaaccttcaataccatccttgattgccatcttgtaggctgtatctaaaattttgtctttactaatttctttttttcttgccattttaatgcacctcaatcattgtataaaacatgtgcttttcaatacacttgttttcttttcttcatcactataatatatccaaaaaaataacaattgcaagtcttatacactaacttattaaaaaatattatcatcgcttaaatagcgatgagccgttgtctcctgtaaattgatcataatgtgaagaagccatttcaataactgcttgcttgtccaatccttgtgcagcacaaaacgaaaagaatgcagcagataaaatatagccgcgttcacgatcatctgtcaggttatctgagaacttcatattaatcgaatgatttgcataatccgttgtcaattcaatcgatttattttctggtttactactcattctattgcaacctcttttttgttctaaaacaaataaaattaaaaattcccggatttaaaattgaagtgcaacactaagtgttaaacaaaaaggccatgaagacctaaacttgaagtgacgaaaaatcaagaaaggaagatcttcatgaccaattcaaattctagcatttctaagcactatcatcaattaaccagcgtacaacgtggacaaattcaagcaatgctggattccggcataacttcccgtactgttatcgctcaagaagttggctgccataagtcgacaatcagtcgcgaaatcaaatgcggaagcgtcctgcaaagagacagcagctatttattgtatgagcactattacgctgatactgcacagatttattatgagaagcgtcgcaaaaactgctatcagcgcaatccattgaagcattatgctgtctttttgagaatgctctccagacgctttaaagctaaatttgatgccaccagcatcgatgagttcgttggtgaattcaaaaggactatgccaggctacccttgtcccagcacaccaaccgtctatcgctatattgatcagggcttgctggacataagcaatattgatctgcctatgaagctcaaaagacgcaggaacaagcgtcatcacagccatggcggtcacgctttgcacaagaagcatcttggcaattccattgaacagcgtcctaaggaggttgaagacagaaaagctccgctgcactgggaaggagatctggttaaaggcgtcagacgcaagaatcagcctgctttaatgactttgactgaaagaaccacacgctttgaagtagttatcaagattcctgactatcgggcaagcacatgccaaaggctgcttcaaaaggagattgacagacatcctgcctggtttaaatcaatcacgtttgacaatggctctgagtttgcggatatgaccaagatcaagggctgccagatttactttgctcacccatattctccatgggaaaggggcaccaatgagaactgcaatggtcttttgcgtcaattcttccctaagggcaagagcatgaaagacaagtcaaaagcttatgttcaacaggcaactgatgccattaaccacaaatatcgccgaatcctccaatatcacacagcagaggaactcttcaagcaatatatctcttcataacctaactgttgcacttaatttgacaattcaggaaaattaaaaatttaaaaatttctattataattatattacaaaatcaaaagaattagaaagcgtgtttttatcaatgaaagtttcaacttggcgctcatcatgcacctcaattttaatcgggaaaaaggcctctctttctggcagtatcatcatcggtcgtaatgaagatgctaagactgcttggcctaagcatttagcctttaatccacatcgagataatgtacagaaaaaccattttaaatccaaagacaataagtttgaaatggatttaccaacagctagctactcttattcttcaaccccagaatggacagataagtacggagtgttcgaagaagacggaattaatgaatatcatgtagcaatgagcgccaccgaaagtgcctacgcaaatgaccgagttttagctgttgacccctttgatactgacaaaggaatcttagaagaagcaatggtcaccgtagttttaccttatgttaaatccgcacgtgaaggcgttcagcgcttaggagaaattgtagaaaaatatggtgcagcagaagctgacggaattctctttggcgatcgtgatgaagcctggtacatggaaatcggttctggccatcattgggttgcacaacgaatcccagatgattcctacgctattgtcgccaatcaactagctattcaagaaattgattttgccagtgacgacttcatgtattctcaagacctgcaaaaatttgtctacgacaataaactctggcctaaaaatcagccattcatttggcgtgatatttttggcactcatgacgatagtgacttacactacaacacaccacgagtatggagcggtcaacgtctgcttactccatctgtagcacaagaacccgaaagctttaacctgccatttattcgcaagcctgatgcaccaatttctgcgcaagacgctcaacgcgttttaagcgatcactacaacaacaccgcctatgatttaaccaatcagaaaaacagaaataatgccactttcagacctatctctgtggctactactcaggaatcacacttgcttgagttaaacggtgaaaacatgattcactggctagctatgggtgtggctgcgcaaagtgtttatgtgccattctatcctcaaggcactaaggtaccaaatacctggaaaaatggaaaagaaacctactcaccaaattcagcttactgggtctttaaactggctagcgtcctggttgatcgtaattggggtaagtacggcaccgctttaagcaatacgcaaagtactactaacgaaaaattgcttcaaattagacagcaatatgatcaaaaattagcacaagaaaaggatcaagaacaacaaattaaattagtggatgaagccaatgccaaattagctaaaactgctactgatgcttataaagaattgatcgctaaactaatcaccgaacaaactggtgactcaccgttgcgtttccaaatggatcctaacttataaacaaaaatgcctcaatgaggcattttttcttactattttttcttagtcattaagccgtccatcatttcataaatatggtcggcgtatttttctagccgcggatcatgcgttactagaataacggccttgtcacgctttttcgctaaatctttaaacaattgtcctacttcttccacattttgcgtatctagcgaagcagtcggctcatcggctaacaaaatatctgggttagcatataaggccgtcgcgattgctactcgctgctgttgcccaccagataattcatttggatacttattaaccagcttttcaatccctagctgcttgagtaagccttgcaatttatcttgcgacaaattattttgcttttttactttatcaatcaaagtaaattgctctttaactgtcaaaaatggaactaaattataagcttgtaaaacaaagccaattttattcaagcgtagttctccactttgcttagcagaaaaattactaatgtctcgaccattaatcaaaatttcacctgaagttggtttttgcaaggacccggcgatcgtcaaaaatgtacttttaccggcgcctgaaggccccataattaaaaccacttcacccttattagcctgaaaattgatatctttcaaagctgcaactttagcttcgcctttaccataaactttattaacatcttttaattcaattactgccattttactcaccaattgcctttgctggatcaaccttcaaaattgatctaatcggaatcaaactaccaataatacccatgactagcatccctaacgtaccactaatcataattgctggcgtaaaagtcattggcacagctgctggtaaagttaaatcagttaaccacatcaagataatcgcaattacaacaccaatagctactaaaattatggattgactgatcgttgcaccaactaaagttttacttggaattccttgagcccgcataacggcaaaattatgcattttttgcatagttaaaatatataggaaaacagcaatcacgatcaaagaaataacaaataagaatccaatcatcaattcaaaagttaagttttgagccgtatatcctggaagcttattaataaaggcttgaattgggtatgtcttggcatccttataattgaatttataattgctattctttgaaacaactgcagaagcggctacattaggagcgaccatccgcagttttttccaagttttcattgagccataaacaattggcgcaatattaatcttggcgttatttacaaaaccaacaattttatattttttcttagagccattcagagaaatttgatctccaagcttgtagcctttgtctttgaaactactgtctactgtaatctgattaccattctttgcttttttcccagcaattatatcttgatcttgataaataaactggtcttttttgatgcctaagaattgagctgaaattgagttttttccctttttcttaactacaattcctaattgaccaataattgcttcattcttgccaatttttgcgttttttaaatcgtcttttgtcagaattgactgactcatgctgatattggcatttttatttaaaacaatcttttgcgcattccaattttcaattgcttgtgtattctgacttgctaacccaacagccaaagatgacaacataaaaattaagtagctgatcaaaaagatcatcaaaataatcaagccatagcgcaatttttcatgcttaatttctttcagtgctagaaacataactacatcccctttgctagtatgtccaggctcttcttatagcgcgccaagttcttttcctgattttcgggatctgataagcataagttgataacttcatgactaagtaccatggcactccacaattgtggccccatattcaacaattgtcttgaataaattttgaaattatgtggtatcaagtactcattttgcgacatatgcaatttcatcattggttcatatttactgtattgaactttatcaataaacttaactactcttgcataaaaatgattaggatcaaatttttcattaggactcatcccagcatgaatgtcttcaatagcgatgtgatacatataaacatatgcatcaattaaatcatcaaaatatttataaaatgctcctcgagcaatgttggcattcttaacaatatgtgacaccttagcatctgctaacggataagtgctgaattcttctaacaacaccgcttcaatacgtctacgtttagcagacggtaaatttttaaaagtttgcttaaccattttgttttccccttttccaacacaaatgacgacttgtcatcaattacttatatcatagctgattttgacgagttgtcaatacatatacacaaaaaaagaaggcctctgccttccttctctaaactaaaactcgattatagtagtacaacctagcaacaccatcacggacgctaaatttgcttaatgcacaattatttggcgtatctatcttgtccatgtcgccattactcaaataatgagctgccatcattcgaatcaaacgaccatgtgccactactaataccttaccttctggatatttttgatatatttcgtctaaaaagttagcgcaacgtgcttcaaactctccgtagccctcaccatttttggcatatttaacatagtcgcgagtaacttttccccatggatcaacgacatccggatattccttagcaatatcatccatcttcttgccgtcccaatcaccaaaatcaaattccagcaaacgtttgtctaaatttaatttctttttacctttagtaaaaattttcgcagtctctactgctctcttcattggactggaataaacaacatcaaatttattttcatcaaacttagcggcggattttttagcatattcacgaccaaattcattcaagtctgcgtcaacttgtgcgccctgaattcgattatctttattcacgtctgtttgtccatgacgaataaaaactatttccattttttacatcaccttttcttaaaatcatacccttatttaactaatctttccatttctttactgtttttttagcgttttgaaatttaaaaagcttaaaatataaatagataattagaaaggggaaacattatgtcccgcgttacaattgaaagagatggtctcaccttagtaggagaccgcgaagaaccattcggcgaaatctatgacatggctatcctcatgcatggttttaccgctaaccgcaacactgaattattaagacaaattgccgatgatctacgcgacgaaaatgtcgctagcgtccgttttgactttaatggtcatggcgaaagtgacggcaagtttgaagatatgactgtgccaaacgaaatcgctgacggcaaggcaatcttagaatacgttcgcaccgatccacatgtacgtaatattttcttagttggtcattcccaaggcggtgtaattgcatcaatgcttgccggtctttatcctgatgtgattaaaaaagttgtccttttagcaccagctgctcaattaaaagacgatgcacttaaaggtaacacacaaggcgcagtctatgatcctaaccatattcctgatactgttccactagtcggcaataaattaggaatgaaactaggcggattttatctccgaaccgctcaagttttaccgatttacgaggtctctgcccgctttagtggcccagtatcagtcatttatggtactaatgaccaagtagttaaccctaaatatgctaaaaaataccatgatatttatgaaaatagcgaacttcatgccattacggatgtagatcacagattcactggtcaatacaaaaagtcagcatcagatttaactgctcaatttttaaaaccattattttagcgccgagtaaagtcgaactcagtacgaaagacgtaatgatccttagtacttacgtcaggttcaaattgaaattcaaaatcattaaagtcctgcaaatctgtgggattttttatttgcttctcggcaatgtagcgcaccatttcaccacgagccatcttagcgtgaaccccaacggtcttccacttaccattttttagttcctgaaagtcaaccgtaattaattgtcgtccttgactcaaataaggtttaaccaaacgtgtatattgcttggaagccaaatcgataactatattatcttcttgaaataaattttcagcgatatcactgccccagaaataatacaagctataatcacgaaaaccaaccattttagtatttaattctaggcgatatgggcaaacaccatcaaaaggccggagcataccataaaatcctgatagaatccgcaaattcttttgaatatagtcaagtgcaggttgtgtaaataaatccggagccatatattggtattgaattcctgaaaaagccaaaattgcaggggttaatcgttcatccaaattcatattttctagttgcaatatgctttgcttagtcacattttcactagcatgccaaaggtcttttaactgttcatttgaccttgacttaagaaatctttctagaattcgtgtcttatccaagaactgcggttttgactgaattggaaatgaatcacgatcaattttcataatttttgcaggtgcaataataattttcatttttagattttgttcctttacggtaaacttaaattgtgattaataagtcatgtggtaataagtcaaatgaaaggcgatgatatttgttctttttgatcataaatttgagtatatgaaactaagccttggtaaaggttgattttttaaatgttaaacttttgtttacttttaaatttagaccaatttttgaaattaagacctcggtgtcctgtacagtttgtcatctttgagcaatttaaagataactcgtactaattttcttgcagttaatgtgcaagcacgtttatgcggcgagtagacagcttcatcatacttcttttggtaatattttttgaaaacaggatcatgtaatcttgctagattggcagcttcaatcaagtaatatcttagatatctgtttccagtcctggccattggagtatgttcgttgctgtgatctcccgattgatattgattccaggttaggccggcatacttagccagctgttcttctttatcaaagcgatcgatacttccgatctcagcgataataccagctgtataggttttgccaataccgggaattgattccagaattttgctttctggtaatgcatcaacgatacgatcaattgctttttctagatctttaatagattcattaaagctttggatcatgttgtaatgaacagaaagcactgcatcaattgaatcagtcattactttgcctaagcgatatgaacctctaacagctttcttaattgctttagccaaggtatctggatcggaaaagcgtcctctgcctttaacctgtaagtaagaaattaagtcttcggtaggcatatccgcgatctcatccagagttttactatcggttacaatagacatcattgtagcaccgaaaagaggagtattaatcttatctttatcgacagtgattagtttattaacccgataatataaagcttcaatgaagtgctgtttggtacgagtcagttcttgaactaattcatatctggtacgcgttaaacgctctaaagcaagatagttgtcttgtctggcaatgcttactcgataatgtccaaagcttagatacaaagcaatgtaataagcatcgagaggatcagttttactttcttcaaagactttatgaaacctgctggtttctttggggttaattacatcagtctctacattgagcttttgtaaatcttcgtcattttggaaaaagtaagcaggatgaaaactgtaaatagatgtagcttccatgccaataatgatttgatcatagtgtttattttgagctagatctaaaatttgttttttcagttcactagcaccataaagatcattgacaaagctatcgttaattaagcgtttgttttgatcttctgaatcaagtgcaacgacctgtaaatctttagaactaacatcaataccgacaaataatttcattggaaatggcctcctttctttcaaatttctgatcatagattttgatcttcacatgttaacccctaattacagttcttaagttcaatctcgccagtataagtattcactggttgcttctttgaaagctgcacctaatcccaattgctcaaggactagcaaaaagaagcaatcaatacagcatgtgagttagagcataaaggaactgcctgggtggcagacttataaagcagacaaaactgcaggaggtgataacctagaccagttgaccaaagccaatgacaattagaggctaacatgcgaagatcaaaaagcaaatactaatttgattaattatcacaatatgactaattacaatttatataatacgaggaggaaaaataatgaatcctgattttgcaattgtcttaaattatcaacttaatgataaggctgatgccgactttttagtaaaaacagcccgtaatatcggtgctcgtgcagtgatgactgacaggcaaactgaagatttcaaaacagcttgcgctaagtatactatttttttagctaatccagaaaatagtactgacttaactaaggataacgtcattgataccatggtcaataaccgtaaagctggtaagactacaattattaatgtgcccgttgaagcaggcaagttttctgccgcaactcaagcaatgctggatacgatcaatgattggatgcaccaattcggtcacgccttcaacgaaggaaaaactagtgctttaaccagtagcgatggctttattttagaaaatcgccacgcaaattaccaaaaatatgtcttcttacctagtcctcttcctgacaaaatcgtggtagaaggcctagtcgaagaacctaaccgggtagaatggattgaacatcgaactgatcttgattttaactataaggatcaaaaattaactattaacttagtcaaaccagatgatgagtttgcttggcaagtgttgcgaattcaagcccaccgacctgaagatgacattttagaaacgaaattttagtaaaaaggcgttctttgtagcagaacgcctttttacaaccttatgtaattgctatttctattttcaaaaaaatttattcttgcttaagctttaactactgaaccattatcaaaaaattctctaaaacgacgtgcttctttatccagagtaatttcatcattaacttgcgataacttatagccaacaaaataaggtggcgcttcaaaacgtgtaatatatttagcacaaataccgtcatcattacgcggataaaagaatagattataagaatcgcagcggccattatacatgatatttaacaaatacttggcaccactttgaatccagtcagcccacaagtcaatgctatttttatctaacaagttaatattgagctcagtgtagccttgaacggggtgttcagcaatgttaacttctaccccacttttttcaaaaagggtctcaccttcaaaattattcgggtgaatatatttatagccatcttcatgttcaaagccaactatctgcatatgcgggtgaatcaaggaaccacctgaatgtggaccatagttcttgtaccaaacaattgactcatattggtcactagcctgcactttttcaaaacaagctagcgcaaaatgcatcaacttgcgattatgttcctgcgtataagtactaatatcgccgttatgatcactagattcaattagtacagtctgccaggtatcgcgcaaggtcgggaacttattcttaagccaaatcatgtcatcttccttggcgtaaatatcagttaaattttcaacatcacaaaatgggcaaacgtttttcttcttatccttacgataagattgcggtttgcctttagcaatgctcatttgaaaaacaagtggatcattagtcatatttattcctttttttatttaaaatagtttaaaatctaatgggtaaagttttactataatgtaaaatattttgtagctttactagcataaaaatacttgttatactttgttaaagcaaacgtttattcgaaatttatcaagagacgggttttaataatgcaatctagaacagaaatgagaaagcgaaacaatcgcaacaatctctatcttattattattggcataattgtcgtaattgcaattatttgtggctttgtcattcataatcaaagggtagctgctgaacgtagccagcgtgaatatgcttctacccacttcaaccctaatgtaacaatttatggtgtgcaagtaggcaagcttactgttaacaaggcgactgctaagatcaataaacaagctgataatgtcgtctttttaagaaataaaaagattattgctgaaaaagacgacaaggttcaaactatcagccaagctgaagttaaaaatattttcactaagcagcatactgatttgccaagcaaacaaaaatacgttttcaaatccgccaaaatagatgaagcaaaaaagagtttgcaaaaaatacaaaatgctgtagtcacctataagatcaatggccaggaattcaagctaaaagctgatgacctaattcacgaagttacttacaaaggtggtaaatataaattcaccgatgtaaaaaaactgcatgctaaaatggaagcgatcgatcaagaagtcaaaactctaaagaagagttataaatttactgttcctactggtaacaaagtcaatggcaaaacgattacggtaaaaaacgaaagctatggttggggaatttatgtcaagaaggctgtggctgcagtagaaaatgcttttattaatggtcaagatgttgttggtggtagtaagtatatttatggcgagggttatagtacctatgctcatggttatggcaagagcaatcatggtattggtaaaaactacgtcgttgtctccatcaaaaatcaggaactatgggttgtccgtaaagggaaagttgccgttcacttaactgacgttgtcacaggtactgaaaataagagtaacgctactcctaaaggtgtttggtatatcatgtacaaagaatcacctagcgtattgcgtggttataacgacgatggctctaagtatgcctccaaagtacaatattggatgccatttactttgagcggctgtggcttacatgacgctagctggcgtagcgattggagtaagtcagcctatcttactggtggctcacatggctgtgttaacattcgtccagctgaaattagaagtgtttggaacaacgttttaactaacgatgctgttatcgtatattaaaaaataaagattaatcgcctacttcaattgaagcgggcgatttttttgcgtaaaattaacagaaaagatatagatttttgaaaggatcaaatatgttagtcatcggtattatttgcttggtggttgctgccatttcttactttaaataccttagtgaaaagaacggacaagctaaccaaaaacaagctgaaaacaaaaatgaggcaaaatggcagcgcactttagcaatcattttcctcgttttcggaattttattaatcggttattggattgcattacgctaaaaaagacgtgaattttcacgccttttttaaatataattgattaccacattacccatattagctcttccctttaaaactaaggtaggaccgccgccattgctttttcctttaactattacattaccaaggctaatgcttaattgattatcaatctgccatgataagggaacgtagagatttacatttcccattgaagcagttagattaagcacgactgtatcacctgctgctttagcatcatcaagatagatattggcattaccgaatgaagtttcaagattaattgactgtaaattttgtgaatgaatataacgtgaagaatcgccagccatcttttgattaattacgatattgtcaccatcttcaatcacatcttgaacatgatgatgtgttacttttgtctctgtatcagcatcgtcactatcatcgtcatcattccaatgaaaactcttcttgataacaatttccggatcttttttaaaaagcaagctcaatcccattgaaacaagcaaagcaataaacaaaatcatccaagaggataagaactttttaatgcccaggggacctgcataagtaattactaaaaaagcaattgagaaaacggacaccacaatgctcttatcaagcaagcccttaattaagcaagccacaaaaatgactgtcaaaataattgtccaaacgctaattttgaagcttaataagcctaattgactgatcaccaaaagcgcagctgcagcgattagtcctactccccacaaaattcttgcaaaactgtttttcattataaagaccttctttcatctaagcatgtgcgtaattctttgtagtatcgacgggatgcatatacagttttataagtatcatgaaactgtatcttgcaatctgaaatcgaccgagttaaaccataaatttgatctaaattaataattgtcgatttggaaatccgcatgaaacctgcgcccaaaatattttctaactcatacaatttatgtttaaccaagtatgccttatcttgtgtatgcaaaattacctgcttggcatctgtttcaaaaaacaaaatctcgttcagtggtaagtagtaagaaacattgtttctaaaacattcaatctgatcattgtgttcaataccttgtaatttcttataaagctgctctatttccggagaaatatttttagctttaataatcagttcatcttctacggcatctggatcaatctcaagttttactttcatgtttctcactcccttctgaatctgatatttatattaaaaaatatttcagatagcttttccatagttttgaactaagtggtaaattttggcttctaagtggcaaaaaaaataagacgacctctgtcgtcttattgcttattatcaatgtaaactagtaaaaaatgttatcagtccaaaaataattcctggaaaattagccgtgaatagcggccaatctttcttttcaccaagaattgcataaagtacccagatcgtgcaattaattgcagcaaccaacggctgaaccggattaccataatttccgttcaaattattaataatttgcggaatatatgaaacatacatcagtacagataataccgacccaatacgtccaatagttaaaacagtttttcggtctaatcctttgaattttttcaacaaatcgctcctttgtgcttcattataagaaaagctagagtcgattgcaaaaatcatactttagtggacaccttccattagcacattaattctcttaactaaaaagaacattattaccgcaaaggctacactgaccaaaccaacagccatgaaatattgtacttcagtgccagttgaatagaacttaacaatttgtgcattcactgcttgtccagttgcatcagccatgaaccacatactcatcatttgcgaacgatatgcattaggggccagcttggtcgtaattgataaaccaattggtgaaatcaacatttcagcaatttcaactaagaaccatgaaccaactagccaaaatggactaaccttgcctgctgtaccataaagcatccctggcaaagccatccacatataagatagaccagcaaaaactagccctgctgcaaacttgcctggagctgttggctgctttttccaatgttcccaaagccaaacgaagattggcgttaaaatcataatgaataatgggttaagagactgaaagttggctgctgtaaagtgccaattaccaatatgaagcacggttctttgagcggcaaacagagctaaaactactgagcctgattcttcaatgccccagaagatagctgcagcaaagaacaatggaatgtaagccttaactcgtgaacgctcaaccttagttacttttgaactacgtagcatcatcacaaagtaataaattggcagtgcaattgctaaaatagtcaataaagtaatgacattgtcaacgttcaattgaccaaagccggccattgcagctaatacaagggcaatcaccacgaacccaataactacccacttaataatattaagcaagtcacctctatcaataggatcattaggcgtcaaactttcaggagaaaggtattttttaccgccccaaacatattgcactaagccaaagaacatcccgattgcagctaaagaaaagccggcatggaagttcatttcattaccaaaaatatgaaagccaaaaccttgtgctgcccatggaactaaccaaggtgcaagaaatgatcctaagttaatcccaaagacaaagatgctaaaacccgcatctcttctgcgatcttcaactgaataaagaccaccaaccatgtcagatacatttggctttaataaaccagtaccaaccacaattaaggcaattgaagcatataacgccgttacaccggctggaagtgccaagacaatgtgacctaacatgatcaaaacgccgccataaaagacggtttttcttgaaccccaaacacggtcagacagccagccaccaactagggttgataaataaacaagtgaaccatagattgacatgattgatgcagccgttgtttggtccattcccagaccacctttggtgactgcataatacatgtagaaaagcaggatggcgcgcattccgtagtaactgaagcgctcccacatctcagtaaagaataacgtggacaaaccctttggttgtccgaaaaatgctgtatttgaatcttgtttccccaaataaaaactcccttcttatcatagataagcacaatagaaataattataccacgaaaaaataaggatccactttttacagtgaatccttatttattaggtaattattgcttcaaattaattgattgccttagcaactgcgttgttaacagccactttttcagcttcgatcaagtcaactttaccttcaataactttaatatccatcttaatttcacgactaagaagtggaatatttacctttggttcaaagaattctttaaattctttaagtctagttggagtatggaagacgcgagtagttactgtgatgaatgttgtaaattccatgtcaccaccgacagtcttatcaagccaatcccaatcttctctaatccagtcccaggctgcttgttgaccatgatggttgctgagcaaaccagcataccagccacgcaagtcttgtggtttaattacgtcagcattttcaaaattatcaacaattaacgcaacttcggccggatcaatcgtactagtaattgcgctacgaagatcaactttgtatgaaggatcagcagttctttgatattccttgattaggttttcgattaggttgtggctaccaaagttctttacttcattgattaaaacatacggacgaacatcagcattcattgcctctaagttgtcttcattagcagtgaaaatctcatgagctgttttaattgagtctttattttcagcgtaaagactggcacttaattcatatggacgaatttgtgcatcttcatcgctttcacctggcttaactttccagcccaaacgagcaacttgaccagcggataacttgtcataaagcttctttaagtccttttcttgagctgattcaggttcaacaaattggcgcaacttagcagcagtagcgtaaagagcattaataactacacttgacttcgagtcagcaaatttagtcaaaagtggcacaacagcagcataagaaatttgtttaccttctgctaaaagacgtaagtcttgcaataattgcaatttggcaattggatcaagttcatcaacatgagccaaaatatcatcaagcaaagtcttgtcatacttaacgataaagtgcgagttgttacctacattaattctaagtgggtgacctgcttcactacgtaaattcttgtagtaacctaagtcgatttccttatcagacataatcttaggtgccttgaagttagcattcaacggaatttgccattgtctaccaacgtctttaccttcaccaacgaagaattgttgttgtgaaagctttaagtgaccatcgctactatcaacatatgcactaactactggataacctggttgctttaaccatgagtgcataatcttgccaatatcaaggtcagttgcggttgaaagagcatcccaaagatcgtcaccagtggcattaccgaacttgtggtggtcgaagtaatacttcaagccttttcttaaggcatcgtcaccaagaagtgaacgaaccataactaacattctagaacccttggcataaacaatggcactgtcgaaggcagagtcaatatctgctgggtcattgatttccatttgaattggttgaacaccgtcagtagcatctctagtcaaagctgcaggtgcttcactggtttggaacatttcccaaatatgccaatcaggttctagaccatcaactgccaagtattccatcatgttagcaaaactttcgttaagccataaattatcccaccatttcatggttactaaatcaccgaaccattggtgagccaattcgtgagtaataactgtagcaaccaatttcttcatttcaaagctagtattgtctggatcaagcagtaaatatgcttcacggtaagttactaacccccagttttccatggcaccagcactgaaatctggcaaagccaattgcaatgattgtggaagtggatacttagtttggtaaaattcttcgtaaaattcaattgcgttcttagcaacacccaaagcaaagtctaattccttaggcttgtgggccttagttgcataaacaccaattaagacgccatccttagtgtgagtagtctttgattgcaaatcaccaaaggcaaaggcaaccaagtaactagacatgcgaacagtttcttcaaagtggtggtagccgtccttgtccacttcaacctcaggcatattggcaagagcaacttcgccatcttcttcatcccacttaagcgcaagactaaaagtagccttagcttctggttcatcaacacatggaaaagcttgacgagcaaaagtagtttcaaattgggtaccaataatttgcttcttcttaccttctaactcgtagtatgaaggataaatacccatcatagtatcagtaagtggtgcactataagcaatttcaattacagccttgctgtttacaccagttgaaattttgatagcttcctctttttcaagtacttcaaaatctacctttttaccatcaaccttaacgctgtcaatggtcatatatttttggttaataaatactggattttcaattacttcaccggtaatcgttgaagtaccattaatttctttttgtttacggtttacgttaatgcgcaaatcatagtgttctggatggaaagtttcataaaaacgtttaactgtcattttttacctcctattaacagctcatttacttttaattctaccaaaataaagaaaaaagcgctcaaaaaaggctatttcttattgattgtaaggatgacgtttcagttctgtaacattgctgtcatattgagcttgtactatagaagcatagtcattaagaaataaataagttttgaaagaattaattaaatttaataaggaatgaatacatcaatgaataaacatgttaaatctactttagtaaaaatcttagctgccttagcacttgcctttgcttgtgttgcagttgcaaatgctttttctaccaatacttcaactactcaaactgttcaagctgcaagaaagctttcaaaagctgaaaaagctgctaagagatggatcgcaatgcgcgaatcaggtggtagctacactgctagaaacggtgtttgttacggcaaataccaattaaacattggctacttacatggtaacctttcacctaagaaccaagaacgtgttgctgataattacgtttacggtcgttacggttcatgggttaacgccaagagattttggttagctcacaactggtactaaaattaaattcctttaattcccaaaagctaaagaaaaccagcttagtccaattgactaaactggtttttgttttactcaaaattatcttgcttgataaaacgataaagtgcaatgactaaaactaagatcgagcacgccattcctacataggccattgttccaatgtggacagcattgtcagcagcttcacgggctacttgattttccattgcatagcccacaacccatttacgcattaataccggcgtcaagacaaaactaactgtactaataattgaagtcactaacgctacattacgcgaatatggttctttaaagaactgtgctaatacgcagaatgctggagcaatcatcaatagcaagatccacataataatccagcgcccagaacttgaattcatcatctgcgcactattagtggcataacgatatgagctccaaagcgatccaccagataaggtattaagcaaactcaagaaataagatccacgttgtccataaacaccaccattattggacagaataccttgaacaagttggaaactatcagttgatccagccgatgaaaaatcgaccgacacaacttgcttcatataagtagctaaaaacatggtaactgagccacctaattctagtgctcttaacatgcttaattttcttgaagctttcagatgaaattccagacttaaaactcgatcaggatggtgactgtgaccaatgataaaaatccctgcaatgacgatcaaggctaagataaccaatccccaccagaatttaatcatggcgaaaaataaggctaaaacaataatcgcaaccgaaatatatggtcggtcagaaaaaatattccaaaagttcaacttaacatgatggtaatttttccttgatgcatttgcgacattttgattaataatcggctgaggattactaatttttctgctgcgaaattcttcacgtgttgttgctcttgtcttagtataatcggtccgtgaacgatctgcgccggcttggccgtgctcttttttcatgcgatattcacgccgcgacatatgtgccataaactgcagcccccttctcaaagcactatagtagcacattatcacttttttgcttgaattaagaatgaaatttcaaagaaaatttagctttgttttgcatgtgctaaaatgaatattaataattgtgctttttttagaaagagataactttttgaataaaactaaatcagcaaaactgccagctggttggcatatggccttttataccttatggctcggttgctttatcactgggatgggctattcaatgacaatgccctttatttcactatttatttcagatttgggtaattattctaaactgcaaatcaatctttattcaggattagcttttgcaatgacttttattgcccaggcaatagtttcaccatattggggcagcctcgctgaccgcaaaggtagaaaactaatgtgtatgcgtgcttctggtgtgatggctttaactattaccctaactggatttgcacccaatgcaatttatattattgtaatgcgttttattcaaggttctttttctggttatattaacaacgccaccgctttaatggcaagtgaaacgccgcatgaacgtagcggctgggtcatgagtcaaatgatgacggccgggactgccggaaatttggttggaccgctattaggtggtgctctctccagcttctttggcaatatgtttggtggcgcctgggggtatcggattccattcttcattaccggtgttttaatgttcatcgtctttttaggtacaacgttcttagttcacgaagactttactccaatttctcgtgaaaagatgaagccgatgggcgaaatcatgaaaagtttgcctagcgtgaaattgattgtggtgatgtttattactaccatgttggtacaatcatcaaccatgtcaattgatccaattgtttcattatacgtaaaatcaatgatgcctcatggcggggatgttgcctttgttgcaggtgttgttgcggcaacgcctggtcttggaacgctaattgcggcatcgcgaattggacacaagatggatgaagttggaccgttacgcgtattgcgaatcggcttagtcgtcggtgcccattgtttgtaccaatggctttgactaattcgccttgggtactagcaggactgcgcttcttattagggattgctagtgcagggatgttgccagccgcacagacggtattaactttaaacacaccaagcgaaagtttcggtcgaatctttagttataaccagtcatttcaagcagttggtgccgtgttaggatcgttaatgggatcgactatttccggtttttcaaattatgcaacggtattctggctaactggatttacgttactgatcaactttgtgcttgttttgatttttgcttggggaatttcttatcggaatagataggttaagcatattcctaaagtatggaatttaaaaatgtaataaaagagctgtaaatatcacaaaaaatatttacccggatttaaaattgaagtgcaacactaagtgttaaacaaaaaggccatgaagacctaaacttgaagtgacgaaaaatcaagaaaggaagatcttcatgaccaattcaaattctagcatttctaagcactatcatcaattaaccagcgtacaacgtggacaaattcaagcaatgctggattccggcataacttcccgtactgttatcgctcaagaagttggctgccataagtcgacaatcagtcgcgaaatcaaacgcggaagcgtcctgcaaagagacagcagctatttattgtatgagcactattacgctgatactgcacagatttattatgagaagcgtcgcaaaaactgctatcagcgcaatccattgaagcattatgctgtctttttgagaatgctctccagacgctttaaagctaaatttgatgccaccagcatcgatgagttcgttggtgaattcaaaaggactatgccaggctacccttgtcccagcacaccaaccgtctatcgctatattgatcagggcttgctggacataagcaatattgatctgcctatgaagctcaaaagacgcaggaacaagcgtcatcacagccatggcggtcacgctttgcacaagaagcatcttggcaattccattgaacagcgtcctaaggaggttgaagacagaaaagctccgctgcactgggaaggagatctggttaaaggcgtcagacgcaagaatcagcctgctttaatgactttgactgaaagaaccacacgctttgaagtagttatcaagattcctgactatcgggcaagcacatgccaaaggctgcttcaaaaggagattgacagacatcctgcctggtttaaatcaatcacgtttgacaatggctctgagtttgcggatatgaccaagatcaagggctgccagatttactttgctcacccatattctccatgggaaaggggcaccaatgagaactgcaatggtcttttgcgtcaattcttccctaagggcaagagcatgaaagacaagtcaaaagcttatgttcaacaggcaactgatgccattaaccacaaatatcgccgaatcctccaatatcacacagcagaggaactcttcaagcaatatatctcttcataacctaactgttgcacttaatttgacaattcaggcaaaaaatatttacagctctttattattttcaattttttacgctaccatcttttcataaatgcgatacatccgattatcataagcgcacattgaaataaccagattatagcccgcgttttctttctgccacttttcaattgcgtcaactgcgatcttagttgcatcttctgcaggatagccatacacacccgtagaaatagctgaaaaaattacgctatgcaatcccgctttctttgccaaagccagtgaattatagtagcaagaagctagcatatgtgcatcactagtcttgccagcataaactgggcctactgtatgaattacatatttcgcaggtaaattatagccatgtgttatccttgcttcacctgttggacaaccatgcaaagtcatgcattcctcaagtaaccgtggaccagctgctctatgaatggcaccatcaacgccgccaccaccaagtaatgaattattagctgcattaacgatcgcgtcggctttcatcttagtaatatcgcctttaataatttttatgtctttcataattatgtccttagaaataaccaacatttctttctaccaccattctaacaccaacaacatcagttaggctcagaaagaatacaaagcatattgttatttttatattacgaacttgaattgatttctatctttagtatcctaatattaattttagcgttataggagcaacgaaatgaaaattttacgacgcagtttatgcatcatttcgatcaccttattttcttttgctttgagcattctcattcctagtgttcaagctagcaaaatagttttagatgatctcatcatatttttatatttaattggaatcgtaattctgggcattctgttgttgtctaacaaatttgattacctatcactcagtctaagcataatcttgctactcgcaactatcattgcttggatcagattcccaatgattagcattatttatactttttttatagcttatctgagtatatgcttactaacaatttttattgctaaaaggattaagaaataagtcactatgttttctaagaaagaactaaaaatcatcaataacgcattaattattatctatttgctttcagtcggcccaacattcagagactgtaaaatattttgtgtaaggatgaataattccttaaatttatttcttaaaacattagaaaaaggagttcctttctcgtatgattggtttgaacaaaaaaacacatacagaaagaagaactccttcatgaatgattttacaaaaaatatagcacaagctctattcaatcaagacaaaataaacgatttattgcgcaaagagctacaacaggctgttaataacttgctagaagctgaattgactgcctttctgggctatgatccctatgccagaaatggctggaatactggcaattctagaaatggtgcttatttccgcaaggttgatacccagtttggaccaattgaagtgcaagtgcctcgagatcgcaacggccagtttcatcagcacacgctgcctgactacaagcagcactctgatgttttggaaagcacgattatcaagctctactccaaaggcgtaactaccagagaaatcgctgacttgattgagaaaatgtatggcagtcattatagtccagcccaagtatcaaatatttccaagcagatgctccccaaggttgaggcttatcacaagcgcaagctaagcgacaagtttttctgtgtctatttggatgcgacataccttcctttgcgccgagaaacgtttgagcgtgaagcagtctatattgccattggcattaaacctaatggacataaagaagtcattgactactgcattgcgcctagtgagaacattgaagtctggacagagatgcttcaaaacatgaagtccagaggcttgaagcaagttgagctctttctttctgatggtgttgttggcatgaaagcggccttgaccaggacttatcctaaagctcattttcaacgctgcttggttcatgtcatgcgcaatatctgtgctaaagtccgggtggatgaccgcgaaaagatcatgaacgaattcaagcagatacatcaacagacaagccaaaaagaagctgcagctgtcttgcatgaattttatgcaaaatggaataaagcttatagccatgttatcaaaggtttgagggaaattgagcccgatctgctggtcttctacaattatcccaaacaaatcagagcttcaatttattcaaccaacatgattgaatcctttaacaacgtcatcaagcgtaaagctaagcctaaggcagaatttccaactgaacagtcgcttgatgtatttattggcatccaggcaatgagctacaatgaccgctatttcaaccgaattcataaaggctttggtcaggttcaggataccttagaatcctattttgattaaataaatgattaaaaaatcaatttacgagaaagaactatttacacaaaagatttgacagtttcaacattcatcttcggttttactaaatcaaatgatttcacaagtactttctttttaattgcaaatatcattttagtttgtttattcattatcattgctatcagaattgctaaaatcaatttcaggctaaagacacaatattatctactaggcttcatcactcttatttcaataatagaactagcctaccctggactgacattaaatgaacgcattagcaattattttgctatcggcaatattattttaggcttgctaactactaaaatctcaaagaaattagtttaaatataggacacaaaatgaaatatctgaaaacaccaagattaattaacagtattttgattactttacgtcatactgctataaattattgaattcttattactttaaaactacatcaggtattttcaatcattcaataaaaaataagactagcactaagccagtcttattttctattaatcaactattcttggggtgagaattgccatactgttccatcttggctacggtatgagccatcactcatctttgtaaatataaagacaacttttttcgtcctaattgtgtaaccgttttttgattcagttgtatcaactcggcccaaatcagccttaacacctgtttggggtggattatttttcttaatagaatatgcttgtaaaatttctttattaagtttagtcttcttttgctcagagttgttactatttttagcaactaaaatagcatgattctttgtaaaatacagatcaaaccaattacttaagcgattttctgtgttgtctactgttaatgttcgattaacccagtttttaggtaccgttgtttgattattgtagaaaaacattccaccaataactgctacaagtactgtaactactgcaattacggataacgtcattttctttttcatgatacgtttcctcttaaattcagcattaattatttggcactaagcctctcgaaatgagtcttacatttcctgaatacatgctaacccatcggtttctatttgttttaaaattgtgatccatccaggtactgtttctatacaaatagccactgtaggcaccatcattataataaactttagaaggtgttgtgttgagtaagttcattccatctcccctaccccaactactgtatctataaacattagatacatatttatgaagcggaccatttttgattggcccatacactttaacactctttgcttctcggactgtagtttctgaagcctgaacattctaactattggtagttaatactggagctacagttacacctacaagagtagcaaccactaataatattgactttttcatttttatttttcctcgtttaattttgatgttagtactactttcttacgaacagaagcaggtgcaggaatgctctttacatcatagctgtacaaatatcttctatataaggtagtagcactcttaccaactttttcacgcataacttttgaaagatatcctctataaccgttatactcaaaatagtgagtggcaccataatcataacttgaacctaaggtgatccaaattctcctaggtttatagtaatctgctcttagttttgaactcacagttgtttgtgtttcagctgatgcgctaacctgattcgaaactgtaaacaaactaacgccaactaatcctactagtgataatgaaactagttttcttgaaattgatttcatttttatacagataaagtaccttcactctctggccaaatcattattatttcctcctttcgtatcttgattatcccatgaaactctaatattacttctaaagttgcgtatcacaaaactactctttccaattagtcaccctatcttcatatcctagagaaataagcatggcttttacttctttagcttttgctatatttccttcatacaaacatttatagaaactcccacatgccttataaaaaagaaaatgattagtattgttcaaattcagtaagtaatctaaacaatttttaacctgatttccttttaagccataattacgccagcaataaaggtaattgatacaaatacttgctatcctatcttcatatttctctgaatatgaaaccttctcattgtaatgtttcaaaagaaaactaatataattatctgcttgttctgtagaaaaaacaggaatacagttatcgaataatcgcagcatatcaatattttctacccagttatcttttgcattaaattcagcaataattgtacttttgaattcgtcacctaactcatccaattgatttcgtacaattgctactgcaacaactactctgtacttaaatattctgctatcagataatttcattacttcttgcaaacattcttcgattttttctttatttgaaccattaaatgcacttttcagtttgttttcaagttttaattcaattaagtcctcttctgataaaaaatcatctttaatttgttccaaaaactgatctacatcaatatgatgggcaaacaagatcttaaatagactttctgcagaaattccttctattcctcgttcaattttagaataatggcttttatgaattattccttgaatcatttcatcttgcgttagtcctaagtgtattctttcttgtttcaaggcttcaccgatagtcatctttcatccctccaatttaacttcaactatactatctttttaattttctctccatacaaaaacgccttgctcaaaagcaaagcgttttttagcataagcaatatttgcattaacccttatcggcacctgcagtaattccgttaacgtagaacttctgcatgaagacgaacaagatggtaatagggatagcgatgattacacaccccgcaacgaattgtgcgaagtatgcggtcgcattacccttagctgtgtggaccatgttgtaaagtccatatgcaaccgtgtaagtcttagcatttcctgaagttgaaagaataatacctgagaaaatgaagtctgtccatggagcgatgaaagcggtcaaggcggtataaacgatcattggctttgaaagtggtaaaccaatgtgtaagaatacttgccacttagtagcaccgtcgatttcggcagcttcgtcgattgaccgaggaatagtatcaaagaatcccttagcaacgtagaagcctaagccggcaccaccaacgtaaaccaataacaacccgaagaggtttaacatgttaagacccttcaagatgtagtacaaagcaatcattgacatgaagcctggaaacatccctaaaaccaatgcaatttgtaagaatggttttctgaatgcaaagcgaagtcgtgataaaacgtaagcaactgaaatagttaagaaagttgaaattaccattgaaagcaatgaaataactaaagtattaatgatccagttaccaaatggatattgtggattagtaaaaataccaatatagttttgcaatgtgaatttttccggccagaaggtcgaaacgaatccagtatcattgaatgaaaaacttgctaagacgatccagacaatcggtaaaatccatagaatcgctaaaacaattaataggatataccgaaagattaatgagagccgtctttgatttgaatatgacttcatgtctagccctccttaaatgcattagtacgacgatatgcaatcagtgaaacagttgcactaataatgaagattaagatacccaatacggcactggcgttataacgctgttcctgaccgaaggtcaagttatataaccacgttaccagcaagtcagtcgatccggcaccattatacttactgttcattggtgcaccacctgtcagcaagaagataacattgaagttgttgatgttaccaataaattgttggataagtgaaggtgccatcacaaataaaatttgtggaaaagtgattgaacggaaaatttgtgcagcattagcaccatcaatcttagcagcttcaatttgatcttgtggcaagttttgaataatcgctgttgaaaccaacatagaaactggaataccgatccacatgttaacaagaataacggtaattcttgcaactaaaggtgaagcttggttatcaataaagtgaattggtgaactaatccaatgcaagttcatcaagatattgttcaaagcaccttggtagtccaagaactgcgccatcatcaaaagtgaaacgaattgtggtacagcccaaatgataacaaagattgttctccagaatcccttgtgcttgattccttttgattcaatcaaaagagcaagcaaaacaccaaagaagaaagtcgtagcagtagctgctacagcccagattaaagtccagcctaagactgggaagaaagtaccagctaagtcaccactcaaaacattgccaaatgcttggaagcctgtccatgagaaagcaattgggtgttgacgatcatagttggtaaaggccattgaaatcatgaagatcgttggcaaaatcgtaaagaacaagatacccaataatggaataaccatcaaggttgcgtgtaaccgagtatcaagcaaactcttaagttcttcaacgttagttggaatatggtccccatcacgcttcaaaatataattatgtctagttgagcgtaagttgacaatgtatagataaatgattgctacacataagatcaaggccaatacaccgaataacaaaatcaaaactgagtttgatggttgcttggttacataaacgccttgtgcggcatcataaacaacttttttggttttaatagtacctaatgtagctaatgaatttaaagtagggataccactgaggataaaccaaacaataaagataatttctgaaagtaagagtgaaataccttttacccattgtttgtttgccaaggcgttactacccattaagaagaatgataacttggtagcaatgtcaccttttgaccaaacctcgcgatatgttgctttaggagctacatgctttttctttagaaacataacttctccccttcttaggcaaaaaggctggacaatttttatttagcccaacccttgcttatgcttttagcaaattatttcttttcaatgttcttagcgagcttagcaagttgtggcttgtattgtgctggcttaatcttgccgtcgtaagtaccactgataagcggagctgcaccattccagaatgcggccatttgtggaagcttaggttgcaatactgagttacctggcttagccatttcgattacagcttcagcaaccgggtcactcttaacagcacttgagttgacagcgctcttcaatactggaatttgaccagcgttcttatgagcaattaattgtgacttcttgttagtaatgtaagcagctaaatctgaagcagccttagcattcttggtgttagcattaactgcgaagccttcaataccaaggaatgcttccatttgtacgctcttaccaccaacttcaatcttaggatacttagcaactgcgaagttcttacccaagatcttcttgatattagcagcgttccaaggaccgtccaaaatagcttgtgcgttacccttcttcaattggttcaaagcgtttgaagtttgcattacgcccttgttcttcttttgagctgcgtaccacttcaaagcattaataccgttttgtgagttgaaagttgagcccttaaggtcttcaccattcttaccgtaaagtgtagtacctgctgagaacattactggccacattacgtaagcgttagtaaagtcggtagctacaacaccctttgaagttaaagtcttccagtccttaacgtcgttagctgataacttagacttgttgtagtaaatggtttgagcttgttgtgcgtatgggaatgcgtaaaccttgcccttccaagttacaccctttgaagcaacatcgacatagttgtcttggatatccttagttgctgatggtgaaagtgggttaatgtaaccagcttcagccatttgacctaattgatcgttaggaacttcaaagacatcagcagcctttgatgggtccttaccaacgtctgtcttagcgttagctgaaccgttaggactttgaactacacgaaccttaatattcttgttcttcttagtaaagtccttagcaatttgcttgtagtaaggaacttgttcagtatccacccaaagagtcaagttagccttcttgtttgaattactgctacttgatgatgaattacttgagccgtttgaacatgctgctaatgataatgcagcaagaacagcagtactacctaaagccattttcttccaaatcttcatgactttttcctcctaaaaaatcaaaacaataaacaattcttaacaacagtagcttctgctacatatggttgtaagcttaattaataattatctgtactgcgttttcagtaccagattagttaacaatcgccttggtggaatctttatcaaagaagtgagctttgttaacatccaagcccatcttaaccttgtcacctggcttgtgataatcacgtgaatttacaatagcagtaaattcagtaccatcaacttcttggtgaagctgaatagttgcacccaaaagttctgaaacaacaacatttgattcaattactgaatctggccaggtttccataaatgcttcttctgagtgaatgtcttctggacgaataccaaagactaagtctttgtcgttgtagcctttttcttccagcagttttgccttaccttcaggaataccaatattcaagcctttgccatcagaaattcgaccgtccttgtagtgaacattgaagaaattcatttgtggggaaccaataaatccggcaacgaacatgttaactggcttgttgtaaacttcaagtggtgagccgatttgttcaactctaccaacagacattacaacaactctatcagccaaagtcatcgcttcagtctgatcgtgggtaacataaatagttgtagtacccaagtcttggtgaagcttagcaatttcagtacgcattaccacacgcaatttagcatccaagtttgataaaggttcatccatcaagaagataggtgccgcacgaacgattgcacgtcctaatgcaacacgctgtctttgaccaccggacaaagcacctggcttcttatccaagtactcttcaaggcctaacatcttagctgcttttttaaccttttgatcaatttcatctttaggcgtgtgacgcaactttaaaccgaaggccatgttgtcataaatggtcatgtgtggatataatgcgtagttctggaaaaccatcgcaatgtgtctgtcctttggagcaacatcgttcattactttatgatcgatttctaaggtacccttactgatgtcttccaaaccagcaaccattctcaaagtagttgacttaccacagccagatggaccaacgaaaacgatgaattccttatccttgatatgtaagtcaaagtcgttaacagaatatctgtcgttacctgcatattttttgtaaatatggtttaaatcaacctcaaccattgtttcccctactctctttaattatttttcattaaaaactttttcaatttcactcaatttcaactcagcagttgttggaacgatgtaatcagcttctttcaaaagctccttatcaccaattcctacggcaaattgacctgcagccttgattgcttcgactccagctttggcatcttcaaaactgattacttcatcagcctttaaccctgcaatttcttgcgctttgatgtaaatttcaggatctggcttaccatgatgaagtgttgctggatcaacaatgccatcaaattcatccataatacctaatctagttaaaatcttaggagcattcttagaagcagaagcaattaccatctttaagttttgcttcttagcatctgccaataactcagggatcccaggcaaaatgtcctttggcgtcattgtttctacttgttcaacaaatttagcgttcttttcagctgcgaacttttctttttctgcttcagtatatttgtcttcttgaccgccatattgcaagatcaagtttaatgaatccattcttgaaataccgcgtaagctatcgagctgagaatcagtaagtgtaatgcctaattctttagctaaattattccaagcagtcaaatgaaacttagctgaattagttaaaacaccatctaaatcaaacaataaacctttaagcattttgcgtttcaccttctttaagagtaagtttttggtctttaactacaacatctaaatcgtcacctttaagcaaggtaagttttgtttcattatgatcgacataaacttcgattaagcgaccacggtagttaatcttaaagccgtagtgatcccacttgtctggtacaaatgggttaaatttcaattgatcatgatcataacgcatccctgcaaaaccttgaacaattgctaaccatgaaccactcattgaagtgatgtgcaaaccatcaactgtatcgttgttgtagttatcaaggtcaaggcgagcagttctttcgtataattcgaccgccttcttttgcttgccaagttcagcagctaagattgagtggatacatggagaaagtgaactttcatgaacagtcattggttcgtagaagtcgtagtttctttccttttgttctttagtgtattgatcattcaagaagtagattccttgtaaaacatcggcttgcttgatgaatggtgaacgaaggatcttgtcccatgaccagtgttggttgattggacgctgatcttcaatttcgcttactggacgaaggttcttgtcaaggtagtcatcttgttgtaagaagatgccacgttccttgtcttctggtaagtaaatcttgtcaacgatgtcttgccacttcttcttttcttcatcagtaacattaaccctggcttgagcttccttagttgctaatggcaaacgctccaaagtgtacttaagtagccatcttgccatcgtactagtgaaccagttgttgttaacgttgttttcgtattcgtttggaccggttacgccatgcataacgtacttgttacgccacttggaccagtggactctagctgcccagaatcttgctgttccaaccaagacatccattccttcatccttaacgtatgaatcatcgccagtgtatgacgtatattgcttaatcgcaaatggaatatcagcattacggtgaatttcttcaaaggtgatttcccattcattgtgacattcaatcccgttgaaggtaaccattgggaacaatgcacctggtaagccttgttctttagcgttatggtatgcgcctggcaattgatcgtgacggtattgtaaaagtgcccgagtaacactaggatcagtaacacataagtacattggaacaatgtaagcttcagtatcccagtaagtagcaccaccgtatttttcaccggtaaaacctttaggaccaacgttaagacgttcatcttcaccgtaataagtcatgaataattgacaaatgttaaagcggataccttgttgagcggcatcatcaccagcaattacaacatctgatttgtcccagcgcttttgccaaacggcttcatgatcagctaagttttcttcaaaactcttagcttgaagcttggtcatcaattcagctgccttagcatcttgatcatctggtttgacgtcacgactagtaacaacaatgacatctttttcaagatcgtagctttcgccttcatttaactcaactgaaagcttttcatgaagttgggctgcttcagttgaaacatcacccttaactacttcaccattatgacgaagactttgcttaaggaggactgtaaattgtggaaccttgtatgggttagccttagtttcaaccttaatagttcttgcttcagcattttcacctaaaggcatccagaattttgcatcgtagttactgtcttcgttaacaacagttccatcaagtgctgcatcaaagtcgattttagctttaccacttaaaacggtagccttaactttaattaaagctgcttcttttaaggtaatatgtaaaaacctttcgaattcgaatttaaccttagtatccttaccttcataagtaaaacttctagtcagaagaccttggtgcatatcaagtgctaagtagaaatcactaaacttaactttagctaagtcaagtttttcaccattaatcgtaattcccatgttgatgaaacttggtgagttaggaaccttaccaaagtactttggatatccgttcttccaccaaccaacacgcgtcttatcagggaaccaaacaccagcaaggtaagtaccttgtaagctgtcacctgaatagccttcttcaaagtttcctctcatacccatgtaatcgttgccgattgcagtcatactttcttgcaatcttttatcttttggttcgaacttatgggtaacgaccttccaaggatcaatttcaaaaattcgtttcatatattctatctcccgtaatattcgaggttctctcttgtttacgctttcattatcctctagttgaaagcggtttacaatattaaatctgctgttaccgttatcaggattagttaacagaaaaagaaggtagatcttaatctgccttcttttttgcttattaaaagtaacttttaatgaacactcactacaaagccttttggtgccaattgattattctcataatcttgactaaacgtgttctcacaattgatctctactggatgatcggtcgtgttaaagtatgctttaattctttcattcccctcacgatcgacctcaattaacccattctctgttacgtgtaacttaattcgacctttaccgaaagtttcatcatgttgcaaacgaaagtcaatcaattgatgaactcgttgccaaaccgggccgtcttcttttgcccaatccattggtttacgacaatcaggatcgttgccaccagtcatacccatttcagttccataataaatgcatggactacccttttgcataaattcaaaagctaaggcttgcaaagccaaatcttggtctccattagctactgtcaaaattcgggctgtatcgtgtgaatcaagcatgttcatcatggctgcattggtagcatcccgatatttcatcaactggtctgtcaaacgactagttaattcttgtgctgacaacttgtgcttaaagaagtgatcctcaatttgcaaagtatatggataattcattacgccagtaaactcatcaccgttaagccatggacgagctgagtgccaaacttcacctacaatataaaaatctgatttaatatcagtaacgaccttgtggaatttcttccagaagtggtggtcaacttcgttagccacatctagccgccaagcatcaatatcgaagtattttacccaataagtggcaatttctaataagaaatcctgtacttctggattagctgtgttcaactttggcatatgcttttcaaaggcaaaagtatcgaacttaggactaccctcaccctttaatggatcgcggtaaggttcaactggatattcattaatgtggaaccaactagcaaaacgagaacttggaccatttttaacaacatcttgccattgcattgattgatcacccaggtggttgaaaaccgcgtccagcatgaccttcattccgcgggcatgagcttcattaacaactttcgcaaataaatccttgtcgccgaatgccggatcaacttgcaaatagtcaatcgtatcatatttatggttagaactggctttaaaaataggacagaaataaaggccattaacacccagtttcttcaagtaatctagatggtcaagcacgccttgcaggtcaccaccatagaagtcttcgcggccaggatgatcctccggattccacgctttaaccccttggggatcattagacttatcaccgtttgcaaaacgttctggaaagatttggtaccaaacagtatgcttaacccattctggcgttttcaccatatcaatttcatggcaatatggcactttgaaataagaaccatcttccataatggccttgtctacatcactgctaattgcacgatcacctacaactacactagtgccatcactgccaattacttcaaaggtatacttcaaacgatgatatggtgcttcaagcgtaatgccccaatgatcttcacactgccctacgccaattttttccatctcacatgttttagcctgttcaagtggcaaataattatcgcagtagtgaacaattacttttttaacgtcatttttagcactgtgaaaacgcacgcgaacatgacttggatcaactacaaaactatcttcactttcagttcggtgtcttaaagctgctaattgcatatattaattctcctttttcaacacaacacctgcataaggcatcaaagttaatttttcattagttaattgatattctcccgcttttagtgttgcaacagtataaccggctggtatttcaacagttgtcttttgatcactcaatgaaacagctacaatggcactttcatcatgtaaatcacgttgataaacatagctattcttatccgttgaaatcatataatacgttccagtctggaataaggcttcttttttgagttccagcagtttttggtaaaaattaaacatgctggtggtatcgttaatctcgttagctacgcaagcatcatcctgtttaatacctgttatccatggtttaacttcactaaaaccatggttctcagttgcatcccacggcattggaccacgggccggcaatttatgtgtttcactagccatagctaaggccgcatctttgctcaaaactttttctgcatcctttaaccatggcgctacaatttgatcttcgaattgatctgcactagtgaaatgtagattctttaaccctaattcttcaccgtaataaattactggaattccgcgttgcaaatacatcaacatcgccaagctcttagcctgagtttgtgtcttagctacgcgtgtagctaaacgagccatatcatgattattccaataaagagtaggctgcgatacgcctgctaatgtttgttgccaaactacttgattttgtttaaaggcagtcaaatctaatttcttaggctgatattgctctgaaaaacgttgatcacagttagaatcatcatcggtaaagtaccggaaggtaatcacactatccattaagtgattgcgcttagtcgtgtaatcaacagccaagttaacgctagcacttgcagcttcacctaataaaagcgtatctggataatcctgcttaatctgctcacagaaaggccgcatccattcctgcacctgtggtaagttagcgaaaaatggttccgcaacgattggcttgtttatgtccccatctccagttggataattttgtcgcaaatccgccttgccaatatggataaaagcgtctaaacgcaaaccatcaattcccttttttagccaatattcagctacctcaagcatggcgtgacgaacttcaggattcttccagtttaaatcaggcattcgcttatcaaataagtgaaagtatgattgaccggttccagctggatctggctcccaaacgctgccaccaaagaatgacccccaattgttcggccgcttgccgtcatgaccagcaaaaatatagtagtcacgatataggctgtcaggattcttgattgcgtcttggaaccaaggatgttgatcagatgtgtgattcaagacaaaatccatgatgaggtgaattcctgccttgtgcagatccttgattaagttctccatatcttccattgttcccatgtgtggatcgatggcgaagtaatttgaaacgtcgtagccgttgtccacctgtggtgaaacaaacactgggttcagccaaacggcgtttacgcctagatttttcaagtaagggatgcgcttacgaataccgttaaggtcaccgaggccatcgccattgctatcttgaaaagacttaggataaatttgatatataattgcgtgatcgtaccaatgtgccataattaatttcctccacgcatagtgtaacggattaaagaaaccgttttcaacaccatatctactgttatcgatatcaaaaaagcacaactcgcttttgagttgtgccttttcttctattcaattactaacttttagttgtgcttacgtttccgatcaacaccaaagcctaaaagacctgcaattgaagctaatgctaaaccaataatagatgctctgttttgtttttcaccagtttgtggtaatgtcttggcattcttttcagcttgaacagcagtattattactgtttgcgcgcttaccatgaacattgctattgtagctgtgattttcactattcaatcctgcggcctgattattccctgaattatgcttagtctcggtccgaatattttgaccattatttttggctttatgatgatctgctttcttacccgaattatcatcttttccaggtgtcttatcagttggtttattatctgaaggtgtagtattacctccattatcagtcttaacaactggaacagtgattgatgaacttactgaagctgaggttggagcattgtaaccatctttgatcttatatccagctggcacaccgtttttaatggcacttgaaggatcaatagttgtaccttcagtacctggaatagtggttctgccaacttcattaccattttcatcacggtagataatggttacttggccttgttgtggagtaggaggcgtgatttcaccgccaccgtttttagtataagtaatagttacaacagcatccttagtatctgcagttggagttacttcagcaacactatcttgacttggagtaaatccagtaaaggctggagcagtaaaggctggccaagtgctggttgcgtccttgtcaatgataaacttatcgttttcaactttacctaattgccagtcaccgtaaactgttttgacatttggatcagttgaaacagtcttggtgcgaccgaaccatacaacttgagtagaagtatcagtcttacctgttacaggattcttaacgttgattgtacgagttggatgagcgtacatatcactgttttcgcctggcttgtttggattgattgttgggtcggttggctcagtagtcttagtgtaagcaactgttacattagcatttggagtgtcagcattgaccgtctttgcatcaacctttgttgcttcatgcccattaaccgtggacttgtaaccgtcaactggggtgacatcatattcttgccaactaccttcagaggcaccagttgacttccaagaattattatccttagtagcaactgtccattctgtccaagtaatattaccatcttgatccttggtgccagcattttggccttcaccaccacggacaaagtgaacattttgggtaatgatgtcggtagtaccatcagtcttataaatcgtgattgtccgagtgacatccttgttcatatctttgtcggatggattgtatggaactggggtgatgttgtcagactttaagtaagtgatatgaacagcagcaccatttactggttgaccattgttaagtgccgaagcgctagaaacagttgtagtcttagttccattaacatatgaatcataatctgaaatttgtggtgcattcattgagacaaattctggttgaccacctaaaacaaacttgtggttttggatagtgcctgcctgccaattacctgtacccgtaacttcaccagttaccaagtcttcaataccattgcggccaaattctactgattgagtgtcaatcttcttttcagcttcacccggtttagtttggtaaatatcacgagttactgtcttgaacatgtccttgtacttaggatcagttggatttacgcctggagtggttggagtgatgtccttagtaccatgttcaacaagaacttcaattgcacttggagcagtagtgttaactgtttcagctgatggataagtgtaactctttgaaattacccatttttctggaacattactatcaattgtattcttttgagcttctgcacttacaattgctggagtagttgaagtaaattgtcccttaattgcatccttagctgtaaaaatcacattacctttcgcatccttataaacaatgctttgagtaaagttttcaggtgttggagttgcagcttcaacattaattgttgcaggaacatcaagataagtaccatcactaaagttaattcttacagtacccttaacgccatttgcaatattcttagttgaaggctggccattttcagcccaggtcatagtgaatgtcttggcagaatcattggcttgtgctgaatcagatgaattagtgccaccccagccattttcaagactattaacattaatcaaagtcttaaattgatcttgacttaagttagaaatattttgattttgcttgaaagttaatgactgattagtagttgaaccatagaagttgaagtaagtgttcatccaactgtcttgagtagataaaccaatgtagccgaataaatcactgtcatcaaagctatagtttacacgccacttagagttacctggtaggctttcaccagatgaagtttgttccttagagttaggatttgctggatcatagagaatatcaccggtaccatttgtaatatcccaattgctatttggagttaagataccattacctgctttgacccagctatacttaataacatttgcatcaaagctatctgacggatcttgggcattcacatacttatcaccttgtaagttataagtagtaactgtcttgtagtcacttgctgcactacccttaccatcccagtcagttctgtagacaatttgttgaatcttagcgatattaggatcaagttcatgactatcagtggttctgtgaactgaaatagttggtgtgatgaagctcgtcatactttgattgccatagtaggtatgatgctctggatcattaccagttatcataactggagcagtaaccgtttgtgtatccttacctggaacactaactgtaactggaatcttgtagaaccctggtgttgcgtcttgccctggcttcaaagtaatcgtaccagtagttgaatctactgttgcccaagttggaacgttatcacctgctacaaatttagtaccatcaggctttggtacaccatttgttgtaacaactggatcagatgctgtgctccctttttcaacagtaactgtcttataacttggactatattcacctgctggcacagcattaattgcaccatctttggtttgaacgtctaagtaagttgggttaccttgagcatccttatcagtaaaggtaagtctaatagttgcctgagtatcaccagcctttggtgcacttgcccatgaagcagtgtactgaataccggcattatctaagttaaaagtatcaactaaatcattcttttgagcgtcggttaaatcttgacctacagtaaccttaaccgggttagttacatccttagcagtagcaccagcagctttaatcgtcattggattactgtcaacagtagtgtcaccaactttaactgatacagtaccagttaagtcttcacttgcagatggagtagttacaacagttgttggagcatcgcccttccaagtaatgattgcactagtcttatcaactggcgtgctggttaccttaccatcttcaccaacagtgtattgattaattgcactaactgcttgacctgcagtcaaattcattgaattatctgtagtttcatgagctttatcaaatgcacttggagcagttacaacttctagggcaccagtcttagtggggtcagttggatctggaatgatcttgccagtgtgagtagcattgccaacataaactggtacgtgaactgtatccttagtagtatctggatacgttacaacaactggaattgtagtcaagccagttggcgtttcagtcgttggggcaattgttaaccaaccagtattaggatctactgtagcaaatggtgtgttatcaccaacaattttatacttagtaccttctggagccttgctacctgggttgattgttacagcactgccttgtggagttgattcaggatatgaaggatcttctgacttagattcaccttgttttacgttcatcggatcatatgaaggttggtaaacatcagcatcagggttagtgatatttaatggaatattagcaaaatcaacggtaccgtcttggtaggttacctttgcccaagctgacttatcgctagtcttcaaattaccagttgggttagttggagcatcttgaccgctcattaaatcttgccattccgttgcgtcagtagctgcattgtaccaatctacatttttaatagcagaaagatctggtgttatggttccatcgctagtccgtaacccagaaataccgtccttggcagttaagtcatttaaggtttgtttagtattaccatcaatagtcttgactactggttgatattgaccagaatcagttggcttagctacttcttctaaagaactacccattgcaactctttgtggagtccaccagttgaagttattcaagagtcggtttaagtatggagtttcatattttacaccatcagctggttgaccttgagtaactgttccatcaataaactgaaaactattaaacccagcttggttttgagcaagatttacttgaccgtttgagtgtaaaaatttaatttcaccattcttattttgtcctagagtgttgccggcttgagtaaagccagaaattgcattatcaccccagttgttttgagtttcaatattattgagataccagtaatcagatgcacctgtgcctttatttccttcatcccattgagcaaatggcaatttaccacctgcactagtaatagttacattattatttttattttcaagacgaagtaaagtacctgtttgatttccggtacgctggaaatttacatacttagggttggtaatagtaacatggttatagctatcaccagttccaccaccccacatagttaccaagccatatttaggagtattagtgaagaaccctttcgtaactgaatttagaactggctgagcattatcttgtaagtcaagcgtcgcaccttcatggacattcaaatcccacttagagcttgaaccactgcctgaaccaaatgagattaatggtgtagtagattgattgttatcaccagtacgaacaattattaatttaccttgattatctaaaacattggaatcagcattagtaatattagcagcaaaaccaacacctaatgaaataggagcaaagtggtaaccatcataattagttccaccattggcaccactaccatcattactttgtttagtattgatgttaacaacaccagttttgccaatgtttaagttaccagcccaaatagccattgagtgaccatcagccatgttggcatttaaattaccgtcaacttggacagtaccagtaatagcgctgttgacaagcatccctttaacatctttagattggccatttaaggttacggttgcaccttgttgaacatcaattgctggagcagtatcatttgtttcatcttcaactttggcccgcaaaatattgccaccagcgttttgatcgttgttagtcttagctgaacttacgttaaagatagtgttagaaccatccgcaaaaataatgtgtgcagctgaaacagcacttgaataattagaaacttgattccctgctacattaacggcttcacaagtgatattgttattacccttgaaggttaccgtagtatacggattatcacctatttgttgagccatcgtggtgttataaaaagcaccatttttaacatcagcagttacattttcaaatgtaaccttgttgttagctaaaagatcagttcttatgtcgtttccacccatgtaaattgggctaaaggcaccaccataactagaccatgaattatcataaccatcagcgttaatggttaaattcttgaaagcaatatcccaaggattactatctttttgattgttagtagtaaagctaagataattagcaccaaagttaatagcgtgaccttgaccatcaatatctaatcctccagaaatatttgaaccagttaagttcatctttccagagttaactagtggttgcggacgattaataccgttaacatttgtacccttattagcgacagtaatgtcactagttaatttaattgtaccgatattatagtcgtttaaagcattaactaatccttgccagtccgctacttcttgtgattgagtaccacgtaaattttgttgagtggtagctgcaacttctctaggttgtgcagctaaatttgctccaagctcttttgcaacttcatctttggtcttcttagcactgatattattgtcttgctcatttccaagtgataaaacattaaccttaccacgcatggtgctagttaaatcgttttagttaataaaaaagtccaatcttgttagactcgacttgtaaatagtaataatagaaaagagtctgatctgattgaactgccttaagcttaagcgttttagccaccatttacaagttagttttaaagatttagtgataatttgtcggcactggtatcgtttgtatgcaccggctgagtttactcatcagcgaaatattgatcaaattaaaactacggacagtctgattttggctttacttatctggcaagctaagacaggaattgaatcacaaagaagattctgtgaatgtttcaattgtttatcacactcacgttttaatcggcgttcacgtcagctattgcaattgatttatcagatacggcaagaaatgaataaaaaggttgacctgaatggacatttcttgatcattgacagctttccggtacctgtttgccaaccaattcgcaactatcgtgctaaaatttttcgcggttatgccaacattggttataaggccaccaagaaaatttacttctatggtttcaaagttcatgccattgttagcgatgacggttccattcttgattatgtcgtaacaaaagcatcagttcatgatgccaaggagacagttgaactgctggaaaatgcccatccatctaattactatcttcttggcgacgaaggctatttaggcaaagaactgcatcaacagctaaaacaaatgggttatgaactttggacaccatatcgtaaaaatatgacaggagctaaaaagcacaatgatcatcaattgatggctattcgcagaacaattgaaagcgacttttcgcttctgacctattacaatgccgagaacaatcgagcacgtagtctgataggctttcaaagccggttggaaattgcaattttagcttataatttggcttattgtctagaaagatttaactagcaccacgcgtataattcttatgtttatggacagatcgcgtatttaactaaccgtgttatcgaggaagttcacgaaaaagagaaaattatttctgaaatgcaacacgaagcggaagggttgtctgaatataatctactcttcactatccctgaattcggtgttcgaactgttacttctttgatcggtgaattaggagatattcgtcttttccatagtagtaatgctcttaatgcctatatcaggattgatcttagacattattatgaatcaggtaactttgttgccactgatcatattagtaaacgtggtgatgcgattgcacgtaaaattctttttaaatccatccaaaacattgccgtggcaagtcattttcatcctaatcatattaatgatttctatcagaaaaggaaaagacaatcttctcagccagaaactaagaaaattgccattgccgcgatacaccgtcttctcagaacgatttatcatcttgtaaaatataatcaaccctataattatcaaatagctaaagtataatttaagattgattattactattattgtgcaacccatgaaaaataaatctagttcatgagcttgttttgttatactttaaatttaactttgagccattttaattatttaattaacttttctatccagctaaattccaaggaattcctttaatatccttgactattcgtagaaaaccaaaataagcactgatgttaaattcatcagtacttacaattgtagagtccctttgttcaacccgtattgataacgactgcttacaataataaaattaagaccactagaataacagcttatggttttcgcaactttgatcattcccgtatccgaagtctactagctctcaaatctcatggtaaaaactaagctaaaagaaaaggtcagctcaagcagcttcgctacttaaactaacctcatcaaaatacctcatcagtactgacaaaggggtaaaattgtagagctaatttgattacttgcgcttcttgtttacagcagcaaggccaaacattcccaataaggtggaggcacctaagcccattaatgttaagctattgtcattaccagtttgtggtagttggttatccttagctgtcgttggttgagacgtaatcgtcttcccagtttgcatgttaggaacattaccttctagtttgccagtaacagcatttccattaggagtagtgtttgtaggcgtattagtagctggtgttccttgtccttgatgatcattagttgttggttgaccgccattagttgggatcaaccaacaactaatgatttgattagggttaccatccttgaaggtgtaagatgttggaacactttcaccaggaactaattgataaccatcaggaatgtgaatattaactggaactgtctgaccagacttgccaggattgtccggaagcttatcgcttggtgtctttggatcagttgttgttgtctctggcgttttgggatcagttggatctgtgtccttagtgtaaacaaaagttgtggtgtattggtatacagtatactggccactcgttactccaagagtacgaacaagacgataacctttaattttcttaggttggacttgccatggaccatttgcataccagcctttttgcggattaaccccattatttttttggttaggattatctaggttgaacgcaagcgtatcattattcctaagcacatttccttgctcatcaatgtacctcacagttactggtttgtttggtagcaagtaaacatgtatccccttagcgtaccaattgaaataatcagaattaagatatgtccctgtacttcctatataggagtaaccttgtttttcgtaatggctaatctcctcactcatttttttctcataattaccattgtttaggtcaatccttttgccatagctaccagcaatcgtaaagaatttgtacggtagatttgtttcttctggaacaagtaacaattcagtcctattactatcagaattattttttataaccttcttatacttgaaagttaaataaacatagttaggatcagctaacgaatttcgagtttgaccagtgattttaccctttaaaacaggttcagaaactaatttatatccaggaatattaatggctgcggcttcatagcgtgatgcatccggtgctttcttatcaccagcacggtgttgtggagattcaggggccatccagaaactatctagaacgattgatgctaaaatatgcccgttatctacatcaacatactctactttgattggtgacaatgatgcgtaatctaaattaatgttaatgtcttgcgtagtaatacctttcttaaggcaggcattaccttgtttatcaaaatagaaatacttattcaaaacttctgaattcattaatttataaccggccacagtaaattcttgatccacactatcccctggtcgaattgtggtctgcttgaaaggttgtttgaatacataatgaccattactaatcacttgaattggcttatgtagggtgacatcgcgaaaattcatagtaatgttgtacttactgggcagtggttgttttgctgttgttttatttggaactaatgttgatgaagtttgatgaccaaccgtatttgattcgtcgctaatccgaatattgcttgaatgggcactaacttgtggatcagtcacttgagtcgtggatgtattttgagcagcaactgtcgtattatctgccttggcattaccactaataatgaaggttaagcccaacgaaactgtcaaatcttttgtgtaaatagttctttctcgtaaattgattttttaattatttatttaatcaaagtaggattctaaggtgtcctgaacctgaccaaagcctttatgaattcgattgaaataacggtcattgtagctcattgcctgaataccaataaaagcatcaagcgactgttcagttggaaactctgccttaggcttagctttgcgcttgatcacattgttaaatgattcaatcatgttagtcgaataaattgaagctctgatctgcttgggatagttataaaagaccggcagatctggttctatgtctttcaagcttctgataacatggctgtaaaccttgccccatttggtatagaagtcatgcaggacagctgtggcttcttctttgtttgtctgttgatgcacctgtttgaattcgttcatgatcttttcacgatcgtcgacgcgtactttagcgcagatattacgcatgacatgaactaaacagcgttgaaaatgagcttttggataagtctgagctaaggctgttttcatgccaacaacaccatcagaaagaaaaagctcaacttgctttaagcctcgggatttcatgttttgaagcatatctgtccagacttcaatgttctcgctaggcgcaatgcagtagtcaatgacctccttgtgcccattaggcttgatgccaatggcaatatagactgcttcgcgctcaaatgtttctcggcgcaaaggaaggtatgtcgcatccaaatagacgcagaaaaacttgtcgcttagcttgcgtttgtggtaagcctcaacctttggaatcatctgcttggaaatatttgatacctgagctggactgtaatggctgccatacatcttttcaattagatcggctatttccctggtggtcacgcccttggagtaaagcttgataatcatgctttccaagatatccgagtgctgcttgtagtcaggcagcgtgtgctgatgaaattgaccgttgcgatcccgaggcacttgcacttcaattgggccaaattgcgtatcaactttgcggaaataagcaccatttctagagttgccagtattccagccatttctggcatagggatcatagcccagaaaggcagtcaattcagcttctagcaagttattaacagcctgttgtagttctttgcgcaataaatcatttattttgtctggattgaatagagcttgagcaaaatctttggtaaaatcattcatgaaggagttcttctttctgtatgtgttttttttgttcaaaccaatcatacgagaaaggaactcctttttctaatgtttaaagaaataaatttaaggaatcattcatccttacacaaactattttacagtctcaaatcaagctcaagtcctgtcactattgagctttcttagacgtaattagtttttatatgatctgtttcagtgcaatttgtatgaatcgtggcagttggttaataaagtcattgattacttcatctatcttttcaaaactattctgtttaagctcttttaattctgaaattaagtagaccaatgcatctacgaatctaatatcaggtaaggattcgttcattagatagaataaatctccgattgtcttatcatctgtattttgtctttcctgccaggtcaatagatcataagttattgctgtaactgcgatatagccacattggccatcatagctttgaacttgagatttatctaaagcaagatattgcttagacgtcttaaaatatgtttcaatttgccatctacgaccataaagttggatgatttcttcagggctaagctttgtctgagtagtagctaaaaccaaatacttgttcttgtttccacggttggagacaaagacgagctttaataaaaagctatgtccatgatattgagcctcaactatgcttgaataaagataatgtttctttttacggatgtttgaagcagccaaacgatcatacaagtctttaacgctatagcggcgatggcgataaatgtaataaatctttgaactcttcttgatcatgccaagtccatctaaaccgatcttctttaaaatccaaaacattcttggagaagaaaaccaagaatcgaataagacgtatttagcttctactcctaatcgtaaggcttgtctaatcaactctacagttacatcattcatctttctctgagcttgatttctccttttaccagaaattgaacgttcatcagcagtaatgggagcagctccaatcatatttttcttggttttggttgacatcaaggcaaagttaaccggcaagaaggtattgccatcgctccagcctaaagttaaaccacgatatccgttcaaatactcatgcttgtcatggtcatagactttagctagcaattcggtctttttagaaaaagaccgagccatcagcgtatcgtcaacgataaaagcaagtcggcgtcttttatcgataaatggttttaagcagccaatgagccgggctgcaatcaagcataatagtttttgccagttgattcttccatcgttaagtacattgcgagcagttctaacggaaaaacgtttgtcatccttagctctgaataaagaaagccgagcaaaatgtactgacatcagccaagagataatcatggttaatgaaacggtggatttacgcttaaaattgacttgtttagttaacttagctagaccaattagattaataaatcccggatttaaaattgaagtgcaacactaagtgttaaacaaaaaggccatgaagacctaaacttgaagtgacgaaaaatcaagaaaggaagatcttcatgaccaattcaaattctagcatttctaagcactatcatcaattaaccagcgtacaacgtggacaaattcaagcaatgctggattccggcataacttcccgtactgttatcgctcaagaagttggctgccataagtcgacaatcagtcgcgaaatcaaacgcggaagcgtcctgcaaagagacagcagctatttattgtatgagcactattacgctgatactgcacagatttattatgagaagcgtcgcaaaaactgctatcagcgcaatccattgaagcattatgctgtctttttgagaatgctctccagacgctttaaagctaaatttgatgccaccagcatcgatgagttcgttggtgaattcaaaaggactatgccaggctacccttgtcccagcacaccaaccgtctatcgctatattgatcagggcttgctggacataagcaatattgatctgcctatgaagctcaaaagacgcaggaacaagcgtcatcacagccatggcggtcacgctttgcacaagaagcatcttggcaattccattgaacagcgtcctaaggaggttgaagacagaaaagctccgctgcactgggaaggagatctggttaaaggcgtcagacgcaagaatcagcctgctttaatgactttgactgaaagaaccacacgctttgaagtagttatcaagattcctgactatcgggcaagcacatgccaaaggctgcttcaaaaggagattgacagacatcctgcctggtttaaatcaatcacgtttgacaatggctctgagtttgcggatatgaccaagatcaagggctgccagatttactttgctcacccatattctccatgggaaaggggcaccaatgagaactgcaatggtcttttgcgtcaattcttccctaagggcaagagcatgaaagacaagtcaaaagcttatgttcaacaggcaactgatgccattaaccacaaatatcgccgaatcctccaatatcacacagcagaggaactcttcaagcaatatatctcttcataacctaactgttgcacttaatttgacaattcaggtagattaataaatgaagaaattaaggatttagtatcattttctgtgtcgatttgttctatactgttcattgcgcaggatctcctttactttttaggtcgacacttaaagtataacgcagagagatcctgcgtttttatttttgataagaaaaagccaagaggcgcggggaaggagcgttaatcttagctttcaagtttcagaaataattttaaaagcagttaaaaagcacctctgagttatcagacgtgctcgttatcttttcgatttatctagttgattggcgccgaatcagcttcggtttaagcattacttcaccttgaggtgaacctgattgggcaatcttttgcagtagcattttagctaacatttcacccatttcaaaaattggttgtttaattgtcgttagctttggattagaaacttgatctaaaaagacaccatcaaaaccaataactccaaagtcttccggaattcgagcgccttcatcttgcaattgccgtacaacacccactgcaattcgatcactggcacagacgaaacaagtatcttttttaaattccttaaaatgttcatgaatcacatcttgcgcagcatgactatgattagaaacccgaaaaatttgtggtatcaactggtgttgttgcaaagtgttgatataaccagcttcacgtgaatattcaaatggctcttttaaatcaattccaataaagataatgtgcttatataaccggtctaaagcatattgagtagccatcttctctgctaactgattatcagaatcaacaaagtcatagccgcggtgattttcaccaaataaaacaaaaggcttatcgagtttatcaaataattcataatctttgtttcgcgccccggtaattaaatagccatctgcatgttccttttcaatttgattaggatccgtaactaattgcatcgcatactgcttagtatttaaaccacgagcaaaaccaaaaagcaagttcatatagtatggctcagtggtatcaatatcttctaaagtgacgaattttaccacgttagtccgattattaactaaagcctgtgcaattgaattgggatggtagtttagtttctccattgctttttctaccattgctcttaattctggcgttacttgctcaggatgattaatcactcttgataccgtcatttttgatacatttgcttctttagcaacatctgataaagtagtcatattattcctattctaagtacatctttctgaatcggtttaaatctttttggctaaagccaagctcttttttgaaaaatccatcaaaactgccccagccttggcgaatagtttccgtaattccacgaatagccggtccctctcccttggtaatattcattttagaaactaggctagcaatttcattatcatcggggaactgtttagccaaagcaaagtcatacaattcattggtcaatacgcgtggtgctagttaaatctttctagacaataagccaaattataagctaaaattgcaatttccaaccggctttgaaagcctatcagactacgtgctcgattgttctcggcattataataggtcagaagcgaaaagtcgctttcaattgttctgcgaatagccatcaattgatgatcattgtgctttttagctcctgtcatatttttacgatatggtgtccaaagttcataacccatttgttttagctgttgatgcagttctttgcctaaatagccttcgtcgccaagaagatagtaattagatggatgggcattttccagcagttcaactgtctccttggcatcatgaactgatgcttttgttacgacataatcaagaatggaaccgtcatcgctaacaatggcatgaactttgaaaccatagaagtaaattttcttggtggccttataaccaatgttggcataaccgcgaaaaattttagcacgatagttgcgaattggttggcaaacaggtaccggaaagctgtcaatgatcaagaaatgtccattcaggtcaacctttttattcatttcttgccgtatctgataaatcaattgcaatagctgacgtgaacgccgattaaaacgtgagtgtgataaacaattgaaacattcacagaatcttctttgtgattcaattcctgtcttagcttgccagataagtaaagccaaaatcagactgtccgtagttttaatttgatcaatatttcgccgatgagtaaactcagccggtgcatacaaacgataccagtgccgacaaattatcactaaatctttaaaactaacttgtaaatggtggctaaaacgcttaagcttaaggcagttcaatcagatcagactcttttctattattactatttacaagtcgagtctaacaagattggacttttttattaactaaaacgatttaactagcaccatgcgtattggtcaataaataatcacgcgaaatggtgtcatcatcaacacctaatgcggtcaaaattaacgccgaagtcatgcctgttctatctttgcccgcactacaatgataaactaacgcatcttcttcaggtaattcaatcaattccgcaaaaattttagcaaattcatgttggctatgtgaattaagcaaaacctgttggtaaatttgaccaagccaattgtcacccatatcaggaatatgatggacaaagcgatataacttgttatcgcctttattttgcttgcggttttcagaataaatatgtgcatcaacaaaacggacatttgaccaaagcttgtcaggcgctgaattttgttcatatttagagcgtaaatcaacatctacggtaattcggcgttcaactaacttttcttgatcttccttcgacaaggagctaagtgaatcagaacgatatattttgttccactttacatgttgacccttgtcattttggtagccgccgatgtctctgaaattcagcggtccatccaaagctaatattcgatcatgcttcatttttccttgcctttcctcattaaagtgttaataccgtacttttattatatcattatcagtcatgtgcaaataaccgagcggcacgaattgctctttgccaacctgaataaagtttttcacgttcaactgcactcattttcggctcaaaggcctgtccaatcgtaaaggtatgctttaactcgtcaatatttttccaatagccaacggcaaggccagctaaaaaggctgcacccatgctggttgtttccagcgttttagcgcgttcaatttcaatccctaaaatgtcagcctgaaactgcatcaggtaattgttgttgctagcaccgccatcaacacgtaaagcaggaatttcaatgcctgaatcttgttgcatcgtatcaacaacgtcacgggtttgataagctaatgactgcaaagttgctttaattatatccttgtcagtagttccacgtgtaacaccgaagattgaaccacgagtctccgcatcccaatatggtgcgcctaacccagtgaaggcagggacaacgtaaacctcgttctctgatgtcgactcaagcgctgcttgttcagagtctggcgcatgcttaatcaacttcatcgaatcgcgtagccattgaattgcactaccagccacaaagattgatccttctaaagcataagtaatcttaccattaatgccataaccaatggtcgttaacagattattgttagagtctgttggcttgtcccctgtgttcatcacaataaaggcaccggtgccatatgtgtttttcaccattcctggtttcaaagctagttgaccaaataaggctgcctgttggtcaccggccatcccagcaattggcacttgtccaccaaagaacatatatgacgctgtttcaccataaatctctgaattcgagcgcacctcaggcaacatttgcttaggaatattgagcaaatgcaaaatatcgtcatcccacttgagcgtgtgaatattaaacagcatggtccgtgaagcattagtgtaatcagtcacgtgtttagcaccatcagttaacttccaaactagccaactatcaatcgtgccaaaaagcaactttccctgttcagctttttcttgcgcgccaggtacatgatcaagaatccagcgaatcttagttgcactgaagtatgggtcaataattaagcctgttttttgacgaatttcattactatagccttctttttttaatttttcagctaattctgttgtctgccgtgactgccaaactattgcatgataaattggctcacctgtatccttgtcccaaacaacggtcgtttcacgttggttggtaatgccaattgcggcaatttgattaggccaaatgcccgaattaataaaagcattggcaattgttgtttggaccgccatccagattttattagcgtcatgttcaacccagccaggctctgggaaatattggtgaaattctttttgggcagaagcaacttcacgtccatcatggtcaaaaataattgctctagtagaggtggttccttcatcgattgctaaaatatatttttctgtcacagttattctcttttctacaaaagcgctttcttataatattactgtttttctgatgcagattctagcagttaatgtaatagatacggtataatttttataaggattttttaaggagggcattttaatggaaaaaaatcaaaaaattgcggtaacaattgcgggtaacgatagcgacggcagcgcaggcatgccagcggatctgcattcattctacgcccgcggtgtttatggcatggggctgatgacagccgctgttgctggcaataccaaaggaatttttgcccaacaaattatgtcacttgattttattcaaaagcaatttgatgtactaaacgatgatttcaagattaatgcgactaagacggggatgctcgccaacaaagaaattatcgactgtgttgccgataatcttaaaaaatatgacatgggtaaaatcgtgctggatccggtcatcgttactaagcatggcgctaccctgcttgacgacgatgcttatcaaactttcttagacaaattattgccgctagctgatgtgattacgcctaacttttacgaacaaaaaaaactgaccggcttagaattaaataataaagaagaaattcacgccggggctaaaaaattgcaagcgatgggcgctaaaaatgttctgatgaaagggcgccacgattcagatacgcaaactacagtaaccgatatcttgttaactgaggacggtgaattccacgaatttactaagccattctttaaaaccgaccgcgtaaacggcactggtgatactttatccgccgtgattgcggcagaattagccaagggcaagtcagtgattgacgctgtaaaaattggtaaggactttacctatgacgctatttctcacccaattgatgttggctcaaaatggggcccaattaatcatttggctgcacaagaagaaaacgaataactataaaaaataccgaagctcagatttgaaacttcggtattttcgtgtctattttatcttctttaggcctactatttttcctgaatctagaacacttaccttcgttaattggttattattgtacttatatgatgtaccttcatccgaaagacgtcttgtgggtggtcatttgaccactctttttttacgcaaaaaaacagcaatgaaatcaatcattgctgctaatttgtttactttttctcaattacaaaataatatcctgctgtcaaaatttggacaattccttcaagtgcaatcgcccaatctgcaccgaaatgcgctacgatcagtccacctaaaaatgacccaatcggaatcatcgacgacaaaatagaatcgttaattgtttctactctacctaaaatatgtgggctaaaactctcttgcaccaacacttcaaagttaatattcatcatcacgatccataattcggacgtaaaaaacaaaatcaacaataaaagcggcatccctttgggaacaactggttcaaggacaattgctaaacctgataacgtgagacaaatgacgactaacctttcaattttgcttttatcaaaagttagtcgctgtaccagtacactgccaactaatccacctattgatgaagctaattctaagccaccataactaattgccgatttagtcaaatgttcagtcgcaaaatacggcaaacccacagatgaaatgccgtaaaaaagattagtcactgcaaaaggcatgatcaaccgtgctatcttgtcttcttgtttcaaattttgccagcctttaagcaaatcttgcccataattttctgtgaaatattcattcgacttatttggaagtaataatttcctaggcaatattagtcgtgtataaaaagctagggcgcttgcaaaaaatattgcagaaataattaccgtggagtcaaatgacatccaagtaatcaataacgttgccgctgcattcaaaaacaaatccagcgtcttataagtcatttggaaaacgccatttactttagttagcttcgcttttgaaacgatgactggcaaaattttttcttcagcaggataaatcaaagttgagccaatcgttgaaatgacgtatacccctagcaaaagccaaatcactaaatcgcgccacaacttaacttgaaacagcaacgtcgctataacgctggtcactatctgcattagagttacaagcgtaagcatctttttgatataaacacgatcaatcagcggcccgaagacgaacgacaacatttcaattgatgagtctgcaacaaagattaacgacaagataagcggcgaatgaaagcgtaccttgaaaaaccacaaaatcgccatataaaatagcgaatcggcgatattggttaacactcgtcctgctaataatcgtctgacattgacattttctttttcgattaagttaaacattttcccattccttttcacaacactattaatgccgctgaaagccagggaaaattactattcaattgtagttaaaactcccagaccttcagctaaaaatctgggttgagcctcaagtagcgtttgacgaatgaaagaaaataattcattcgcaaacttaaacctaaaatgtcacgcattttagtcctcgctttctgtgaaaattaagttaattatagcatggatagcgacttatcaataatagtcattctatccttatatttttcgtattttcattcaatttcaaatcatgacttatgataataaccaaattaacttgcgctatttcctgcaatagttttaatagatcactttgtaactcaggatagatatttgccaacggttcatctagtaaaaaacattgcgcgccagtttttaaaacagcagaatataactttactaactgtatttcacctgttgatagttcatttatctttctatctaaaatcttttcaattctaaattgtggcgaatcaaaaacttttgcaaaatacttgcttttataaacctgacttttatcagaatatgatcctaaatagtccctcactgaacaattaggaagtggtatatcttgaaataaacaacttatatttgattctctcagttttcttttattaattaaatcagcatctataccatttatggttatttttccttcctttttcggcgtgtataggccaattattgttctgagcaaagtagattttccaattccatttctgcccctcacaatataaaatcctggagtaacaaaattggcagaaaaatttgaggtgaataagggggttttttcatctaaataaatattaaaatcctgtacttgaatcaaatttattttagaaattatttttttaccatcttgttcattcttcatggttagtaaattgttgattctcatccacgctactttaaacgattcaaatttaaataagatagaaaaaatttcatcaacctgtcccaaaagttgattaaaatattgaaaaataattgaaaaggaaccgattgtcatcttgccggaaatcactgataaaccgccattaataaacaatactaattgaaaaataagttgcaaaacaatctcgctattagacatatgtcaactaccctagactgaagtctagggcttagtggctcgttagcttgcgctaaccagaacaccaacttgcttagatacggacttgacttaccagcaatagtcttttgactattgccgatagaggtcgtctaattaccaaagccttttgagtccgcgagttgctaacggactacagcctttctaggctgctttttttattttaggattctgccacttgcctaatcctttttctaagatgttcactgccgcattccaatcacgaatatggtgcgttcaacagattggacaagtccattcccgatctttaagcgttagtttcttataaccgttttgtcccataatactgccacaagcatgacagcgttgagtagtatatttaggatcaattgttagaaattctttgtcatatagatctgccttataagccagcatgttcaggaagctgcgccaaccaacatcagaaatagcttgagataaggcatgattctttaacaggtttctgcttcttagttcctcggtaactactaaatcgtggtttttgattagtgcagttgagagtacttgtaaaaagtcactacgctgtcttctaatcttgtcgtgcagtttagcaactattagacgctgtttttgatagttttttgctagccgcaaattgcgtccttcttttttagcccggcgctgccggcgagacaagacacgttgagcgtgagccagtttcttttgggttttgcggtaaaagcgtggattagcgaccattgatccgttagatgctgtcaagaaattatcaaggttgagatctattccaatttgactctgcgtcttaggcaaggctttaacaaaggcaatatcgctgcctaactgcattgataagtagaactgctcgtcagcggtctttttaatcgtgactgttccaatacgagttggaatatgattaagcaagcgctctttgattagttttctaaagccggcaatgcggacaattcccagcttaggcagtttaacgtgctgagcatcaataaacctagctgtcccgttatcaagaaaagcttctttttgcttaggatattgacagttggtctgatatgaccagtcgctgcgttttttatggaaagttgggattccatgaccaatcttacgatagttgttccaagctttctgatagttttgaatcgcattggcaagagcgagactatcaatttctttaacacgtaaaaagctataagcatcgcggatattcttaggcttagctaataacgagttattaatgactacttcttctgccagcttagtctcataattattaagaatagaaaagacaaaaggcattgcttgatattgtctaacagctaaatagtgcttagcatgataattgcttcgattgcgtcctacataagagttgtatacaaagcgttgcgcatcatagtttagtttaatgattttcttttgcttagaactaggataaaagcgaagcttaacgccaaagtgataggctaaactgctcattcttttcatgtgtttcacctccttctgtagattagatatttatattttacaggaaagccgaacatatgtctctatttttttgaataaaaaaagctgactgctaggtcagcttggccctatccatccccgcattaagatacggggatttccgggcattttcattaaattgagaagaaaatctcgcttagcaacgcctaaaagcgttcttttagtattgctccatctctcagtttcgattttctctcttcgattaccttttatttcaatatatctgcttaaccattcagtaaaaccagaaaagtactcattataagcttctttcaattttaaactaacttcaaaaatcttagatcgcaaaaataaatatatgagactatatgcaggtaacaggatcgctattaacaataaaaaaccagacccagccataaataaatatgtaaaaatcaaaattgaagaaagggcgattgaaataatttgatttattgtttggaataaaaaagtcaacacttcagtagtatcttcagtaattttatctgctgtttgaaccgaattcatctttgtaactgctagcgtatccttcacatacagttctttcattattacatcattaacttccatgtttatttctctaaatcttaaaatctgaattttgttcataaaatatgacaacaaaagtctgataagacttaaagtcgttattaatacaatactacgtacaaaagcagccctatcagccttatatactaaggaatttaacagtattccttctaagtaaacattaaaagtcaaaatgccagtactgataatattcattcctaatagaagccaatattcaattttatactttttatcaattttgctaaaaatcgtatgcatagtgtcacctaactctgactagcagtcaaaaatgttaaaatataatgaatataaaattagataaattttatattcttatttatcctatgtcaatactaaataaattgatttggttttactttcatgctgtatttgatattatgtagttactaactaccaaataactatctatcaactacagaaagagaaaaatatgactgaaaaagcagcaattaacatccgtgttaataaagaaactaagcaaaacgcagagaaagtattaaacaaactaggcatcccgatgtcagtcgcaattgatatgtacttacgacaaattgcattgactgacggcattccctttgatctatcttccaagaaaagaaaaaagaaaaatgatcacgaaacagcaatgatggtcgcagaagctacagctcaatatgaaatcgttaaatccaactgggaggataaattagctgagtttattcctgactggatgaacatgaataagatgactaaagaggagcttgaagcaaggttagctaagcatgcccaagatgcaagagatggtaaaagtgtcgagattagcaaaacttttagcgacctgaataaagaattaggaatttaaatttcatacaagaatatactgtcaaatcaagtcctaacgtatctgtagaacttaaagagatatatagctctatcttgcaattatctcgatctccaaaaactgctcgagattatgtaaaagatcttgaacaaactatgcaagcgttaaattattttccagaaagatatagaaaaactccttcaggaaaataccgacgagttaatttcaaaaaatacgctatattctactttatcgaaaacgatactgtacacattattgatgtcatactagcttcatcaagtacagtattcaaatattaatcctttgccccattctagctattaagctatactagacagaagaaattaaacaaattaagggacaataaaatgagcgataaattaattaaaattgcatacctctacgaagatttaatgaatacttacggtgactcaggcgatgttaaaatcttgagctttttgctaaagcgtgaaggctacgacactcaagtcgacaatatttcacttggcgatgacttcaatgcctttgactatgatttcgtcttcttcggcggtggtcaagactttgaacaaaccgttgtagccaaggatttaccacggcacaaagaaacacttgataaatacatcaacgatgacaaacctatgctctgcatttgtggtggttaccaactaatgggtagttactataagaccaactcaggtgtaacaattcctggcttagacattttgccacttcacactgtcttcaagagcgacaagcgaatgattggtgatacccgttacatgaccgaatggggcgaagttaaggcttttgaaaaccactctggtcaaacttacttcgacaacaaggacaagttgcatcccctcggcgacatgatcgaaggctacggcaacaacccacaagaccacgtcgaaggcctgcgctatcgcaactttattggttcatactcacatggtccactacttaaaaatactaatgtagctaatgccatcatgaaaatgattatcgcttggcaccaagaacgtgttagcgaagccgaaaaagtcacagaataaaaaagacccagtcagaatctctgactgggatttttcattatcaaattaatttaaaacacgtttagcagctgagggataaaagtaggcactgatagcctgctttctcaccccttgactaggagttgcagcgtgaacatattgtccatcaccaacataaataccaacatggtaaggagctgaggcagaaccccagaacaacaagtcgccttttttaagatgacttaatgatacgcgtttacctttagtaacttgaccataggtggttctaggtagtgtctttttagcagcctttttataaacgtattgagctaagcctgaacagtcaaaggctgaaggaccagtagccccataaacgtaactcttaccaacttgttctttagcaagttggactacggcgttacgtttttctgttttgctttgactagctgcttggacagtttgcgtttgaagtggaacattaatgaatgaaattcctgtaaaaaatactgacaaaactgtggcaaacttaactaaactacgtttaaaactcaatttatttctccttaacacttcttatctttcaatgttttctatattaccggagaaatattacagccttgttttaaaatgactactataaaattaagcaatgtaacaaaatctgctatttcttgtaaattttgcttaacttgaaaaacactataattttctatatgcttaatacattaatttaggagttttttattatgaataagatagatagttatgtacgccactttttaatactaatcgcactaattttagggctttcactcgtctcagaactgcgtgaaattattgcctatgactcatctacccttggtatcatctttttaactgctgcaattatttgtacttttgcttcaggaatcacattacaatttcataaactaaattggattacgatcattttaattctgattctttctacgattatgatcttattctggctcaaaacccacacttttggccttattgtcagcatttttatgatttacaatattattgtatttctggtttgtgctattaacctaatttttcaaaatgatgctgaatgattaaatcatatgcttaatcataggtaatacaatcccaattaccactaatccaccattaaacaaaaaacttattaatttcttttcaaaaaagtatttcttcataaaaaaagacctttctattatgaataatcaaatcttcgggctaaaattccgacaattacgaaaacaacaacatatcactttagccaaagcagcagctggtataacttcaagacagtctctaggtaactgggagactggcaaaggcgaattagcatttgagaaagttttactgctactaaaaaaaatcaacgtccagccaatagactttttagagagtagtataagtagttacctcaaacaaactacttcacaaatctctgcagcttatgttaacaaccaagttgataaattattgcattatgctaataagtatcttgacataagccatcgtaatcttacagacagagttagctttttacgagctgctgtggcatgcaattattacatggacctaacgagtatagatctaacaactagttctgataaactacggatcatctcccattttaataaaatcttgaatggagaagaaatctggaattttgaggatatttattttttaggaaatacacaaaatctgatgagtccacgtgacatttatagtttagcctattctttaaattattatcgtcaaaagcacaaaaacgataatagagaatggatcaatgccgtttataatactttgataaacgctgaatttgtacttataaaaacaaatattaaattggctactgatttagacttacttttaagacaaaagtgggatttaccagataattatgctttcgaaaaaattcgacaaaattttatgcatgaactgctaaaatatatttcaacccaagatgaaagtgcaataactcagcaacttcacattcttgaattagaacacctatctgatttaaaaactggttttgaaacagcatatgaacaagtaaataaaatatattttcaataaactctcctcctagttagtaatattatcttatttctaatattgttagcgctttttgccaatattttagcatttttctttttacaaatattagccatgatattttatattcgtaaactaattaagattttttgaggaggatataaagatgaaaaaatcaattaaattagttaatgtactttctgttagtgtactgactttaggacttgtagcacctgtaaccacagtttctgctgatactgctaattctgagaatatcgcagtaaaaacaaacaatgaatcaacacaaagtacagatacatctggcttagaaatctatgatcaatacgttcaagtaaatcctgaaaaaaatcaattcgaattatccaaattaggtgaaaaggttttaccaactactgtatcatcacagattcagagtcaattaaatgctaccaataaagaaattaaggctaataattttattattgaccctgaaaccaaagcaattgtaaaatactcaccttatattaactttgctgctagcgttagtggcgctgcgcgcttaagaagcggatgttatgttcgatggttctggtggggctttagattctactttacttcaaatgcagcagtaacttggtttagagggattttaggtggcgcttctagtggagccaccataggaaacttagtagctgctgcaacgggccatgctatggctgcaactacaatagaagcatttggtatgtacgctgatagtatgtctagagatttgtatgattataataaaaaacaccgtcgtagtaaagtatatatggatctgaatggtgtatttcaatattcatttcatacattctaaaacatttggagaaataacatggggattaaaactttagtatccgtcattttaatcattatagtcattgtactagcctgctcaccattttataaaaaatatcaattattctatttaaacaaagtaggctattgggatatcctaatccaattcctagtaattgcaggtatcaacttcttcatcggtttaaaatatggtctgggtgccctgtttttattgattgttcccgttccactagacattattttcttaatctcaatgatttattcttaccttaaaattagaaaaatgaaacgcaaatagctcttaaaaaacgaagcaaattattgcttcgttttttgattgatcttatttttcttctgtttcggcgttagattcaaagccatcgcagccacgacaaccaacactgatccgacccaatccatcggcatcattactaacccaaagaaaaggacagaaccaactgtagctgaaaatggttcaaaagcatctaataaacttacagttgatggaattacataccgcagcgcgtttgccataatttgaaatggaataatcgttccaattacaataactgccgcagtatacagccaaacttcaggcttattgggaactgcatgaaattgcggatcaattatcaacaaactgattccagcaaaaatcatcccccaacctgttactaccatactagaaacctttttaacaatgttaaccggaatcaaagtataagcagcctcaccaaaagcagacaaaacgccccaaaacagtgcaactggcgtaatggccaaatgattaaattgcccatgcgttgacaataaaaacactcctaaaaaagcacataacgccgctatgatatccaatctacgcataacttgcttgtgcgtgatagctaaatatcccaatacaaaaaatggcccaataaattgcaagattgtcgcaatcgaagcattagccacttgaatacacataaaataaaatagctgcactggcaataatccaaatatgccataggctataataaccaaaacattgtgcttatttttcaacgtagctattggtttttgctttaaaaatcctgaggcaattaataaaactgctcctgaaataatcaaccgaatttgtgttaaccacattggtgtaatcttcggactaatatcaaacaatcctttagcgaataatcctgacacaccccacattacagctgccattgctgctagaaatgtccacaatcttcgtgtttttgctggtaccatctcgttcacctttttctttctcattcacctaataattaaaccacaaaaataaggatacctactgggcatcctcaactttattgatgagtttttttaactttctttttcttaggtgaaatattcaaggccatagctgccagcacaactaaaatcgaaccaatccagtccattggggtcatcaccaaaccaaagcaaataactgaaccaacggttgcagaaaaaggctcaaaagcatctagcaaacttgccgttgatgccttgataaagcgcagcgaattagtcatcaattggaatggaatcagggttccaatcacaatcactgccaccacatctagccatatatgtggcgtattcggaatatgcggcatctgtgggtgcacaatcattaggcaaattcccgctgacagcaatccccaacctgtaacgactaaactagaaactcgcttcaacacactgattggaattaatgtattggtcgcaactccaacagctgaaagcaaaccccagaatagaacgctaggcgttaaagcaaagtgattaaaacgcccatgtgtcgccagcaatactacgccaataaaggcacagatggcagcaagcacatctattcgccgcattacttgcttatgcgttacagctaggtagcccattacaaaaaagggaccaacaaattgtaaaatcgtggcaatcgaagcattagcttgttgtactacaataaagtaaaacaattggactggtaataaaccaaaaatcccatatgcgataatcgtccacgcgtcatgcttatttttcattgtagcgattggcttttgctttaatacggcagctacaattaacaaaataatgcctgaagttaccattctaatctgtgatagccacattggtgtaatctcaggactagtattaaatagactcttagcaaatagacctgatattccccacattacgcaagctaatccagctaaaaaggcccacaggcgccgttgtttttgtgtaaccattctttttaatccccaacttttctaaaactaacatactctatcataacaaaaacgggctagcttgaactagtccgttaattttttattcatcgtttttcttaattgggtttctgctaggcattagctgcatgaatgtagcaacaataattaaaaagccaccaagcatgtccattgggccaaagtccgcatgaagcagtgaaactgacaggatcgttgcaatcagtggctcgagggctccaagcatccctaccgtacttggttcaatatactgcacactagataagtacattgtataagctaacaatgttccaccaataataatataaacaattacccaaacatcaactggtgcaagttttggcattggttgagtgaagtaaattggtaaaaaggcaatgcctgcaaccaacattgctgcgccgattactggaatcggcccatactttttgaataatttcccaggtaatactgtattaatcgcttcagaaaaagccgcaattaagccccagaaacaagcaagcggtgataaagcaagttgatcgaatctgccacctgtagccaagatgaaggttcccacaactgctaccacaattgaaatcgcatcaattcttcgtggccacatcttacttctcaatgaagaatatataattatgaaaactggcgctaaaaattgaatcaccgtcgctgtcggagcattgctgtacttgactgctacaaagtacgataattgtgagctccccattcctaagaaagcaaaaatgatcaacataatgattacttttttatcatgtagcattgccttgacttggtccaagtatttccaacaagcataaatcataagcagggcgcctgaaaaaagcaaacgcagacctacaagccaagcagtatttacattagtgctagaaaataaaaattcaaccgccgtacccgatgcaccccaaaaacaggcaccgacaacagctaaagtcaatcctttataacgctgattcacattcacacatcctttagattaatgtttttcattgtaacatgggctaaaggaaaagttcaatgcttctaaagttgatttaatctatataacgtataacctgacacgctagccaataagccgattgtaaaaagcaaccaagattctggatgaaaggcaattaaaacaagtgaaagaaagcctgctgctaaactagaattgcgttccattcgctttttgccaaaaagcagaccgcacataatgccaaacatagttagcacataaaatgagtcaactaacagtaacaaattctcaataattgctagatcacttggctttacttttacactcaaatcagtaaaaatctgagcacagccaaaaaataccatcacaaatgcagctaagatcgtgataaagctaatcgtacgaaaaactgacttcaccttttgagttggcgtttcatcgataaaggtttttaagaaaaactcgtgatctttttttgctactacagctctgcccgtcttcttgtcataccagttcaatagaccagaaccaattagcataatagcaatcacagcaaactggatgacaattaaacgcatgaaaattggaaaggcatagattaccgtcaataacaaaattactatatagatcagctctgcataaagaaagaaatgcagacgctgtttatttttgaaaatagtttggaatgtttttgaattaggatcttgcataagacttctccccactaaatcttattacgaaaactcaaccagaaatttgccccactgagaatcaagccaataacagtggctacttgcatgcttggctgcatgaaaagcaagatcagtgataaaacaacagttaaaacgctagacgcacgaattaatttacgatttccacctaaaataccgacctccacacaaaagagtaaaacaacatataggccatcaccaatcagccaaacattttcaaagagattggcaaaattaccggtaagcggcttagccaaaatgtcagtccaaagctgacgtgcaaaagcaatacttaaaccgatatttgcccaaaagagcaagaattcaaataagcgaagaaatacgtttttagtaaatctaatactagtcagtgtttcccagaatgtatcgtgttttttaatcactatccttcgatcaagaaaggcaccaattgaataataaatcagaattgcaatcccttgaaatgcaatcaaatgcataaaaactttaaagtcaaacatcaatgtgaatagtaaaactactacataagctaactcaaaatataatacacagcgactaaactttcgctcgctaagccagtgcttcaattctcttttattcatatgatcactaatattgccattcatattttcactctcttttaataattatctaattatgtaaaaattgtataatgatttcaaaattttgtctagtccttttataattgatttagtaaatatttttcgaggtaaattatgaattatcccattttaattactattttgatcttcttgctgtgctttggccgattcatttggatcattactcacgaacgtcgttccttacgcgctggagttagcttagttatcaccttatttagttttttatttttaggtgtagtcattctggttaatatcgctgaccttgatccacattacaaagactggattttgccattatttgtgattgcgctatttgctgtgatggctggaacgattatctttgcattaactttgatcattatgtttttctacgatggcattaaaatcattatcaaagaaggaaaccgctggacaaattatctttctctgggcatggggatttccattatcttcttcctatttttatatcctcttgtgggacgaattagtcatgatagctggttaaagtatccttatatttttctatggctagtcatcatctacttagtcactatcatgatgatgtatactttaacttcttggattaatttaattaattggcacatgccgcacttagactacatcgtagtgttaggcgctggcattatgggaacaaaggtaacaccacttctggcagcaagaatttcccggggaatagaaatttatcacaaaaatcctggctctaagttaatcatgtctggtggccaaggacctggtgaagacattcctgaagcagttgctatggctgaatatgctgaaaaactgggtattaataaaaacgatattattatcgaaaataaatccaaaactacccagcagaacttgcaattctcacatgcactgatgaaaccaaatagtcgcttctgtattgtaaccagctcctaccacgtgtatcgcgctctggttttagctaaacgtcaaggactcaagtgtactggttatggtgccaaaactaagtggtattttactttaaatgcttttgtgcgtgaattcattgcatatctggtaattactaagaaaatgcaattgactatcatcggttttctagcagctatcatgattgctgctgccgcatttcatttttaatttattgcgttaagttgagaaacttagcgttttttattgatttatcttttaatttttttataattatagtcaaatctatagaaagcaaggtgtaactatgaggattcgtaaaaacaacttgtcaaactgtcattagtcaggatgacgagtcctgactttttcaaaaaagcaggttacttatgtcagaaacaaaattcaataaaactcttcttagtgtcagtcatgtggatttttcctaccctaagcgcaatttattcaccgatctaaatttttctattgctaatggtgaacgtgttgctctagttgggcctaatggaattggtaaatctacactaattgacctaattcgtaagcaaatccaaccagatgatggacagattatttgtcacggtgaaattaattatgtacctcaagtcaatgatcaaactgtaattaatgactcaaagagcgctggtgaaaagcgattagctttaattgaaaatactatttggcttcctagttctcttctcttattggacgagccgacagtttacttagatgacacaaatatccagaatttactctacttactcaagaattatgatggagcaattctagtagctagccatgatctggattttatcaaccaactatgtgagagaactattattctgcagccaaataatgcagtttattacccaggaaattacgcacagtatctcgaacaaaaacaattagataaacaagccgtatacaattttaacgaaaagcgagatatattaaagcaacaaattactgaaaaagtctctactttaaagcaaaaaagtactgactataatcattttgctaaaacacaagacaatactggtcgctatccttcgcgaagccatgatcatgtccaaaaaggattaaatagtcggcttaagcgagctgaacgtgaactggctaaacttccagagaaacagcacctatatcaacatcaacttaaacttcctgaatttaaaaagtggccgactaaaatacataattactctatcaaaatagatcaattactcagtccccaaaataagactttattatctaatacacagttaaacttgcaaacagccgatattattggattaatcggccccaacggctgcggtaaaacaacattgctcaaatatttagaacactacattaatcagcagcaatctttgccaccagccagctacattggtttaaatacgactaaacaaaagaaacctgccacagtagcagatttctttcacgagactattttgagcaaaactgaagttaagcgtcttttagttaaaatggatatgtttgtcgatttgactacaagactcacggatttgagtggtggcgaatttgctaaattagcattaatcaagcagctataccttgaacaagaatctattctattacttgatgagccgactaactatcttgatccagaaagtgtgacggccttggcccaaatgctaaaacagtcgcatctcacttgtattattgcatcccacaattgcaaatttttaacccaattttgccaacaaatctataaaattaagcagcaaagactaattgaattgcactaaagcatttctcttaaacacatatttgctaagcatatcctttactatcctcatctatattaatgaagatcacatttggtgctgcagaagtttggtgcgtttctttattatatttaccaccataatactcataacgaggtttccccttgccaaaaggatctattcggcaaagaaagatcacatatgtcgctttgaattctttttccggagagccacctagcccgccatagattatttcttcctgataagcgttggcaacttccagaatgttttctcctggttcttgcgaccctacttgaatgattaacccgtatttattgcgcctcttgtctcgcgcaattacatgtacgattgctttttcatctaagacatttctatttggatcatcaagtgattttgcttcctgaatattgagttcgggaagcattctttgtactgctgtaagaagctgctcattatacttcttcataattcctgcggccatgtgatccaccattgccggtgacatttcattttctaacataaaaaaatcctcatttctaaaaatctgagagttttatccctctattacttattacgcaaaaaaacgcaaaaattttttcggaaatgaagttttttcaattttttagttttcttttctaaaaaatggactgagtagcgatacaagcaggccgtaaataaaataccagcgataaatatctgccaagtcttgattttgaatccacaaaattattgcaattactgtcagtaagccacctaaaaagattgttgaacccatatttttatcagtaaagaagctgatagcagcacctaaggtaattaacgctaccaaactataaatgacgataatcactggtcctttagtctgaacgttaacatcaagcattggtgcgttagtaaacagctgccacacgataaaaccagctaatgcaatgccacatagcaatactagtaatctaaaaacaaaagttaaagtctttttcattatttttctcctgtatgcataataatactagtataacagcaatatcgcggcatacgaaaaacgcttggatttttccaaacgcttttttactattcttttgcttgcataaattgttttctagtgatgtatttgattgatttaacgtattgccccttgtgttgaattgaaatatattggcctgatggatcgtagccgccaacctttttcaacaataaattctttttcgtcttaggattatacgccttcacattgtaataccgctgtgtgcctttatctacttgagcatagcttgtttcctgggaaatgaatggattcaatctatcagtaaaagagttatgaaatgaaaaaatgcagattactcccactactagcactagtgccgttacaaatgcggttttaatagtacttttattcataatattcaccttcatcgttcaactattgttatactaaaatagtacaccaattcagttactttaacaattgtttctagcaaaaaaacgcttgaaaaattccaagcgtctttcacctaagccaaaaatctttttatagcttcttctacactagcattcaatgattggtgcttcgttgcagcataattagccaatttttcatgtaatgaaggatcaatgcgcacattaaaattacctttaaaaggtttctctggtataactccatcttccttacagctcattagataatcatcaatggctccttgaaaatccttctccaattcatctattgtattaccttcgtaagaaataagactcttaatcccctgaaccttaccaaaaagaatcttatcctccaaagtatattcaattgaaccttcataacctttatacttcatatattgattagtttttttcatctttattcatctctttgattttatcttgaatttgtttgatttgatatggtaatagttcttttctaggatgtggtttatgaagaatgatccgatcactgccctttttaaaaataattctagatccactcgtttttcctttattatcgagttgataatctagttcatgcaatagtgttttagcatctttaaagtcaaacgttctgagactgtaaaatagtttgtgtaaggatgaatgattccttaaatttatttctttaaacattagaaaaaggagttcctttctcgtatgattggtttgaacaaaaaaaacacatacagaaagaagaactccttcatgaatgattttaccaaagattttgctcaagctctattcaatccagacaaaataaatgatttattgcgcaaagaactacaacaggctgttaataacttgctagaagctgaattgactgcctttctgggctatgatccctatgccagaaatggctggaatactggcaactctagaaatggtgcttatttccgcaaagttgatacgcaatttggcccaattgaagtgcaagtgcctcgggatcgcaacggtcaatttcatcagcacacgctgcctgactacaagcagcactcggatatcttggaaagcatgattatcaagctttactccaagggcgtgaccaccagggaaatagccgatctaattgaaaagatgtatggcagccattacagtccagctcaggtatcaaatatttccaagcagatgattccaaaggttgaggcttaccacaaacgcaagctaagcgacaagtttttctgcgtctatttggatgcgacataccttcctttgcgccgagaaacatttgagcgtgaagcagtctatattgccattggcatcaagcctaatgggcacaaggaggtcattgactactgcattgcgcctagcgagaacattgaagtctggacagatatgcttcaaaacatgaaatcccgaggcttaaagcaagttgagctttttctttctgatggtgttgttggcatgaaaacagccttagctcagacttatccaaaagctcattttcaacgctgtttggttcatgtcatgcgcaatatctgcgctaaagtacgcgtcgacgatcgtgaaaagatcatgaacgaattcaaacaggtgcatcaacagacaaacaaagaagaagccacagctgtcctgcatgacttctataccaaatggggcaaggtttacagccatgttatcagaagcttgaaagacatagaaccagatctgctggtcttttataactatcccaagcagatcagagcttcaatttattcgactaacatgattgaatcatttaacaatgtgatcaagcgcaaagctaagcctaaggcagagtttccaactgaacagtcgcttgatgcatttattggcatccaggcaatgagctacaatgaccgttatttcaatcgaattcataaaggctttggtcaggttcaggacaccttagaatcctactttgattaaataaataattaaaaaatcaatttacgagaaagaactatttacacaaaagatttgacagtttcaacgttcttggatgactatataactttattaatagcttttctaatttactcacgttatcctcacttaagtatataatataatatatcatttgtaactaaatttgcaactaagacaaattatacctaattcgctaaattcacgctactaaaaaagcgcttggaaaattccaaacgcttcttttgtttaatcatctagacctaacttcttaaagatatcatcaacatgacgcaaatgatagtgataatcaaatgcatcatcaatatcttccttggataggtaattcataatttcactgttttcaaccaatggcttaaactgcttttgctcattccatgatttagcagttagcttctgtaccatatcataagctttttcacgagatagacctgcttcatcgatcaacttaagcaacactcgttgagagtaaattaatccatatgtacgatccatattcttaagcatcgtttcagggaatacatctaagttagtcaaaattcgattgaagcggtgcaacatatagtcgacgccaatagtcgtatcaggcaagataactcgttcggcacttgaatgagaaatatcacgttcatgccataacgctacatcctcgtatgctgtaacgacatgtccacgcattactcgagccattccacagaggttttcagatccgatcgggttacgtttgtgtggcattgcagatgatcccttttggccagcgcggaaatgttcctcaacttcatgaatttcactgcgctgcaagccacgaatttctgtcgcccaattttcaatactagtagcaatcaatgctaatgtcgcaatgtattctgcatgcaaatcacgaggcaatacttgactagtaattggctgttgtgtcaaacctaattgcttcattacgctagtttcaactgcaggtggaacattagcaaaagtaccaacagcacccgaaattttgccagattcaacgccttttgcggcatgttcaaatcgttcaatatcacgattaatttctgcgtaccagcgagcaatcttgagaccaaatgtagttggttcagcctgaacgccatgtgtacgtcccatttctactgtgtacttatactttttagccttttctgcaatagttgcttttaattcgtgcagatcttttctgataatctcatcagcttgtttaagtaagtagccttgagcagtatcaaccacatcagttgaagtcaaaccaaagtgcacccattttttctcagggccaaggctttcagacacagttctagtaaaagcaaccacgtcatggtgggttacttgctcaagctcagccacacgctctgcagtaaagctggcattcttagcaatcttctccgcatctgcttctggcacttcaccgagttctgcccaagcctttgttgcggcaatttctacttcaagccaagctgcatatttattttcgtctgtccaaattttccccatttctgggcgagcataacgttcaagcataaattacatttcccatggattcttcaaaacaatagtttgttcacgatctggaccaactgaaacagttaccaaaggaacgccaaccaactctgaaacgcggttcaagaatttcttagcattttctggaagagcgtcccaagtcttaacttgagtaatatcttcatcccaagctggaagttcttcatatacaggcttacatctgtataattccttcaaacttgctggataataatcaatcttttcaccatcaagttcatatgcagtacaaatcttgatcttgtcaaaacctgaaaatacatcaagcaagttcaagctaaggccattgataccagcaacacgctttgagtgacgcaatgcaacggagtcaaaccaaccaacacgacgtggacgaccagtaacagtaccatattcatgagcagtttcacgaatacggtcaccaacttcatcaagcaattcagttgggaaaggacctgcaccaacacgagtagtgtaagccttgcagacaccaattacagtatcaagacgattagcacctataccaatacctgaacaaataccaccagaaatagtattagatgaggttacaaatggataagtaccttcatcaatatcaagcatcacaccttgcgcaccttcaaataaaactttcttattttggtcaagtgcatcattcactaagacagaagtatcagttacatacttcttcattctttgaccatattcatagtatttatcaaaaatgtcttcaaatttaagtgctggcttaccataaaccttagtaaataattcattctttacttcaaggttagcacgcaatttttcttcaaaggtgtctttttcaagcaaatcacaaacgcggattccaattcttgaagccttgtccatgtaagttggtccaataccattcttagtagtaccaatcttgttagcccccttagcttcttcttgatattcatcttgcttaatatcataaggcataatgatgtgggcacgattagaaattctcaagccactagtatcaatgccactcttttcaagattttctaattcgccaaacattacttctggattgattacgacaccattaccaataactgtattgtccttggctgcaaaaataccagaaggaattaaacgcatcttgaaagtttgaccattaatatcaatagtatgacctgcgttgttaccaccatttgaacgaactgcaactgcagcatccttactcaaaaagtcagtaatctttcccttaccttcatcgccccattggcttcctacgactgcgactgctgtcatttaaaattcacctcataaaaatctctataaatattacgtatgctagtctagcaattaatttacaaataatcaatataaaatccgaattattttatttttaaattatttcatagttcgatttttatattgacaaacacaaattattcccatatagtatgtctcggtcaacaaacaagattaaagggagcagttttaaaatgagtaactactttagtatggaagcctttgactatgatgatatccaacttgtacctaataagggtattatcaaaagccgtcgtgatgcagataccagtgtcaaattcggaaaccgaacatttaaaataccggttgttcctgccaatatggaaagtgtcattgatgataaccttgctatttggctagcccaaaacgattattattacgtaatgcatcgttttgaacccgaaaagaggatttccttcatcaaaatgatgcatcaaaaaggattattcgcatctatttcagttggcattaaagacagtgaatatgattttattgatgaattagtcaaggaaaaccttaaaccagaatatattactattgatgtagctcatggtcactccgtttacgtgattaagatgatcaagtatattaaggaaaaattacctgattcatttttaacagcgggcaatattgctacgccagaagccgtacgtgaactcgaaaatgcaggcgccgatgcaaccaaagttggtgtgggacctggtaaagcatgtattaccaaattgaagactggctttggtactggtggttggcaattagccgcattaagaatgtgcagtaaatctgcttctaagccattaattgccgacggtgggattcgtcataacggcgatatcgctaagtcaattcgttttggcgctaccatggttatgattggttcaatgctggccggtcatgaagaatcacctggtaatgtaatcaaaattaatggtaaaacttacaagcaatactggggctcagcctctgaggttcaaaaaggtgcttacaaaaatgtagaaggtaagcaaatgttagtgccataccgtggctcaattaaggatactttaaaagaaatgaaggaagacttgcagtcatccatctcatacgctggtggtcgcgatcttaattccattaagttagtcgactacgtaatcgttaaagacaatatttttgatggtgataagtaattttaataaaatttttgcatttttattattttcctgttaagaatattacgataatatagtattatctatcttttttcgatagaataatataagtcgagttattgtagggtagtcaataactcggctttttttgattattttttaaaaacgattggacagagttttaaattgtgttatactagttgtcgttgatgaatgcgcccttagcgcaactggatagagtgtctgactacgaatcagaaggttgaaggttcaaatccttcagggcgcacttaaaaacgggaaatggctcagtttggtagagcacctggtttgggaccagggggtcgcaggttcgaatcctgttttcccgataagttagccgcacttcattgaagtgcggtttttttgtgtaaaaaaataagtattccctcggaaatacttatcatgctatgcccctttagtagctcgtctaaagataatctgtgtatctgaatctacatatttcaataacggtaaatcgtaatccttaacctgggccaaaacatttactttctcattgcatggcaaatcgcgtttagtaatctcgatttcgccttcataacgcggatacaaatgattatcaatcgtcacgctgccagttggtctagcataaatattatcttgcggctctgttgacaaaaacatcttttttctgctttcctttaagcgaactacgtcacgcgccacatctggacgattatgccaatcattaccaaacaattctggtatatcagtatctaaatgcagtgtaattgcaccctgtttttgataattagtaatcgattcaattgcatccctcgtaagttgcggatctcccacaaaaatgtgatcgcaatcataatctttcaattctaagatcgcagctaatgggttttcatatcgctgcttctccaacgttggcaatcctgcaaaaattggtccacgcaatttgccatttcctgaaataaaggctgctgttttcaaaccatattgcttaagccactcattcttcttttgcatccagtgtgcatcaagacctgtttcaggacgtgggtagaagttatgtcctgctgttaatttttcaaaatttgcattgctataacgcagatcatcaatattttgttgcgtaataatgctggcatttagaactatcggcatttctttggacaacttggcaataatatcagtagaaaatccatgatctactctaagaccagttagactcaaacttttaatttgctcaacactattgacattaatacccaaatcttgcagatcatctgccgtgacatctgcaataattttcaagtctagtttttgacaccaattagttaagtccgccagccgatttaaaatcgtctcactatcagtatcaggtacagctagctgagtaaaaacgcaggtaaatccactattgcgcatcgtcagcaaataattgtaattctcggacgtcaaatcgtgtcctagataaacagaaaatcctaacattcttattcctctaaaattaattaatttcttttattatctatagcttaaacgctttcttaaatatcttactacattttttgcttgcttttttctaaaaaataatgttaaatacatataaacaaattaaaaagcgatgaaaaagacgagtaaataatctaattctttccagtgaattagtgctagtgtgaaactaatagaccctggattattgaaaaacacttttagcagctcactgaaacaataattcttagagtaggttgagacgtctccggtacgttaccacgccggtggagcatgatagtgcttcatgagtcggtctattaaaatatagacaatgtgggtggtaccgcggaaaaaagcctttcgtccctgtttttttagggagcgaagggctttttctttgctctaagtacattagaaagaggacttatattatgacacttattttacctaaagattatcacccaacattaactgtgcgcgacactgaagctgcgattgtatttattcgtgaaaccttccaagataaattggcagaaattctcggtttacaaagaatgtcagctccaatgtttgtcgaaaaaaagaccggcttaaacgacaacttaaatggtgttgagcgtcctgttgcctttgacatgaaggcaatgcctaaagaagatactatcgaagtagttcactcattggctaaatggaagagattggctttgaaacgctatggtttcggaatgcatgaaggactttacaccaacatgaacgccatccgccgggacgaagatcttgataacttccactccatctatgttgaccaatgggactgggaaaagattattagtaaacaagaacgcaacaccgacacacttgaagttactgtgatgaacatttttaaggcaattaaggcaactgaaaagctggttgctgcacgctacccaggctctacttatcgcctagctgatcacgtttcatttattactactcaagaattagaagatcgctggcctgatctttctccagaagagcgtgaagataagattgctaaagaagaaaaagccgtctttattatgaaaattggtgacaagttaaagcgtagtggtgaaccacacgatggccgtgcaccagactacgatgattggcaattaaacggtgacttagtcttctggtatgaaccgcttaacagtaagattgaaatctcttcaatggggatccgtgttagcgaagaaagtttgcgtgaacaattgaaaaaagctcactgtgaagaacgtgagaaattaccattccaccaaatgcttttgaagggtgaattaccttattcaatcggcggcggaatcggtcaatctcgtctctgtatgttgctgttaggtaaggctcacattggtgaagtacaagcttctatttggccagaagatatggttgaggcttgtgaagctgacgatattaagttgctgtaattttaagatttttttacataccaaaaagtgtctgggaaaaaaatagcttccagatgaataaaaacgatcaagatttccttttttaagaatcttgatcgtttttttgttctctttaaaatttttaacaataaaaatcggcccttcagccaccttctttgacaatatttgttcaaattcatcatcataaaggcaattccgatatcggtttcgaccttctctttacctcgcaggtgcgttctgcgcatgccaaatacgttcttcaaatgtccgaaaactggctctacatcatattttctcatgccatagatgtgtctgccttcttcgctttggagaacttcttttgctttttcttttaaatattgccagttaggattatagcgaacttggcgctggcggccgctagctgttttagccaattgttccaattctggcgttagctggaactcgtctgcctcataaaccttaaaatcacggacctgaccagtagaacgatccttgcgctggctgtaatatttgaaattgaatctgacgccatgatgatcaatgtaataatcatctttttcattgtagtaccagttgattagcttagttggatcattcttatactttttggtctgttctttttcatacatagtgtagggaataaagtacttcttgtctggatatttttcctccagcatcgaataattgtattcactgccatagccagcatcggcgacgattttgtcaaacttgtccaacacggtcatttgatccaaaaccggctccaaagttttgaaatctgtcggattaggaaagatggcataatcaactacatattgatcggtcgtgactgcttgaatattgtagccaggctttaattgaccatttttcatgtggtcttccttcatatgcataaaggtggcgtcatgatctgttttggaataactgttgcgtccggcaaagatctcttcggcttcttcatatttttgcattcttggcacataatcttttcttagccggtgcagaatcttttttagtccacgtcgcttggcttttcgaggtgaaccgccaggaatggctttgttttcctgctcaatctctttagtcagcttgttaatttctgcttcagtttcttgagctaattcctttagcccctgactagtttgaactttttctttttccatttctttgactacttctttagtaatcaattcatcataaagttcaactgcctggcctttcagcttttcatgatacttttcaaccgctttgcgccagacaaatgtatagcggttagcatcagcttcaatcttagtaccatcgataaaagcagcaccttcattgattaagccttcatcttctaacaggttagtgaagtagataaagctctttttaatcagttcattggcatggctgcttgatctaaaattattgatagtatgatatgaaatcttttgctggtcagccaagatcatcattggcagattttcttccagcatcaactcaatctttctgccagaaaaaactcttctggagtaagcaaaaagcagtattttgagcatcatggctggatgataggctgggcggcccgttttagcagtcttgcctactaaaacatcttctggaattgaatctacaaaccagctgatgacattagccaaatgattggccggaatggcaaaatctagattaagtgttaaagcagtttgacctgtgatataatttttgtacatgttagtttccacctttttgtttttattttgtgatgatttaataatatcaaggctggagctaaaagtatacaaaaagagcgttgaaacaaaaattcaacgttcttttttcatgatctgagacttagttttttcccagacactttttctattgattttatttccgttctcttctagaaatccaagccataatcaatggcaacaatacaaagccaaagaccatcatcgcaatggcataccagttaacaccgataacttgccctgctgcgtttactacaccaaattgtgccttccagttatattcaactaacaagaagatcacaatcacaccagataaaattggcacaataacatcagtcataacgctcttattagcctttaagatatcttcttttgccttaccacggtaaaattgaataactgctagaggtaccacgatgaaacctaagaatctaaccatcgcgctcaaagtaatcaagttgaccatattgtattcaaaggccatcggaatcaaaattgccaagccaacagagataaagaaagttctaattgggaagttattcttagttctcttagttaaagcttgtgacatctgaccctcacgagccatagcttccagaatacgtggagcattaaagctggaagctacgttgatcccaaacattgaaaccaaggcaccaaccaagattacatcacgtaagatttcattattaaaaatagccgcaatcgctacaacttgcttagttgtcattaaagcacgtggattaagtaccatcgctaccgctacaacgccgatatagacaaccgcaataattaagattgccaatggaattgctcgtggcaagttcttttcagggttcttcatatcttctgaaccagaagctactgattcaaagccggtaaaggcatagaaggctgaaacaattgacatgacaaaggtagttgtagttaaagttggcacaattttctgaccattctgagtcaattgatctacttgccctaggttgcttgatgcaccagtagtaattaacaaaactactccagcaataataattaataccaatgcagccaacttaccgatagtagctaaattcattacatacttaactactttttgaccaaacaagttgatcacggtaataattgccatcaagatcaaaaagccaattgtgacatttattgccttattgggatttccgccaaaaattgaaatagttgacttaattaccccaacagccattacgccccaagctacactggctgagaagtaacgcagaactcccatataaaagccaatttttttaccaaaagcggccttggaataagcataggcagcaccagatttagtgacatactttgaagctgccgcaaacgaaatggccagaatcgctgcaaaaattgccgcaattaaatatacaactaaagctttactaccggcttgctgtaccacactaccaggtgttaaaaaaatacctgaaccaataatggcattaatcgctaacagcacaattgaccaaaagcctaatttatctcctgttttttcagtcatctatttgcttccttactttgcattatcaacaacaaacttaaataagttattcataaacgctacatcggaattacggtgcaacatttcagggtgccactgcacggcaatgacattaccttgtttattttctagcccttcaaccacaccatcaggagctgttgccactgcttttaaatctggtgcaacgtctttaattaattgatggtggaaagaattaacgcgaaattcagttttgcccaaaatttcagccaatttactatcagcttccacttccatactatgagtaggcaaagttggcgtatgaccttgcatgtgtttcaaagtaagttcttttctgtatgaaagatcttggtaaagcgtaccgccatgagccacattaataatttgagcaccacgacaaatgccaagtaccggaataccattttcttctgctaactttaacaagcgcatatcaaaatgatcgcgttcaggccaagtagcaccaatcttttgcattggctcctcaccataaaaacgtggatcaacatcatgcccaccagataagatcaagccttgaacatgattaagctgttcacgaatcacctcatcattttcagtaaatggaataatgtaaggcacaccgccattttgaactactgaatctacatagtcttcgttcacataactacgatggtatcctgggaaaattcctctatcgtcaataattacagaacctgagataccgataattggttttgtcatttatgctcctccttctgcttactttttgtatgtaatattatagagaaatttatgcaaaaagtacaattaaaaaattgcattgttgtctataatttttgcatatctttaaatatagtaaaaaacagcaagccttatttttagctcactgttttatgctatttataccaaattccaaaaaggatttccattacatgctaaatatgtttctagccactgtttaaaagagaaatcaaaatattgttcctctattccaggatacgttagataggactgtttttgattgtagcgatctaaattaatgcccatttctccctcgtctcttaaccaaagtataggtagataattaggtgttttaactaactgatttaagacatactcaatagtgtaaattctacaccttgctccacctaattcgatgccttgaaaagaatcaatgaataattctgcaccgttagcctgtatccaaaactctatcaaatcatttgggacagatatgcctgacaacctatttattttattttcagctactggcggatttaatttaaatttacagtaatagacgccaccaaaaccaaatattggtacgtcgacactgcattttttactaatcaaatttatattatctattatattatccattttaataattaataaaccatttagttataagcttatgtgcttcaattggtactggcattaagttgtcaaagtcattatttccaccataaattctaggtcttatatgatgaacttgattttcagcccaatactcttttgattgattgccataacgctcactaaactcttttatatagtaatatctatccatcgtagtccatactggtgaagaaggaagtctagaccaagtagtattgattggtgtttctgcatcttttttagagacaggatcaacatattcaggaaaattttgaccaattttattttgtaaataaatagaactaagtgaaattggataagtagcgctatttccattatagcctaccattccccatgctcctccaacagcaaaaaatgttgtagcagctggaaatacagcagaccctaacaaaccagtagtaatattgccttcttttacaattggactagctgtatttgtagtaattgggccggacaatgatggttcactatagaattgcaattgaactgaaattgcagcaggagctggaccagttattgaatcaatataaaaattgattttaaattgtccatctacatactcttgtgaagtatgaaatttaacaactgtatctggaatctctgccaaaaaagtatatgcagagtaatggctacttgttgcattaaaattattatgaatttttacagttccattttttaaaatagggacatctttttttacattttcattctttaacttatcttgagctaaagaatgaaaattttgttcattagctattttagcaacattcttatttacatcatttagcgagtcagcctttgcatttgtattgatagctataaagcacacgatagtggctaaaaaagcaaataactttctgtatttcatgtttctttcctcattatctataatttttaacacaattataaggatctttctattattctaccatacaactctatcacataagcaagtgctcccacactgtagcatcagatgctactgggatttacactctagattgatgtatacgaagaacacaattacaatcagaataacatgaaatactactatagcgacaatttaaaatatacagtaaaatctttaaactgtatttcttattctaacccttgttcaaagcgatactgccgtaatacatattccttgaaaaacggtaaagtaaaggccacttcaccataattagtagatttgataacttgatcatctaacaagcgtctacgatagttagcaacaaaattgcttggacggtttaacctttcatgaatttctttaattgaaacacaatgttttgggctctgagccatagctaaaacaaattttcggtcttgctttgacaaactactaagtactttggtataaacattttgctttagcaccaataagtactctgatttaatacattctaaagtgttttgatctattaccttactttttttagcagctttcaaaactaaataacctagcaactgaaaggcatatgaatagcccattgtcatcaacgccattttttcaagaatttttttcgacacttgataacctgattctttaaaaactttactatagctagcttcaacctgtgagagattcaatgctgataaagctattcgctttccacgtagtaagaatgaagttatattttcgtttttcaattcagagatattttcagaaagaccagctatcattaaggctataggataaccctgccgatttaataattgataacatcttgcaaaatctttcaactcctgacatagttttacttcgtctaaggtaatcaacactttaacgtcattttttcttacttcatcaaacatgttcgttaaaatatcttgatatgttaacttactaacgtctgtagaaagcgataatccaaaattagagaaatttagtccttcaatagatttaaatgatttttttagttttgaatctgcattcagatataagctattaataaaagaaggcaacaacttcatccccatggccaaattaacaacaatccaatctggatatgcactaatctttctgtccattgctgtcaaaaagacagttttgcctattccacgcattccataaacaatcgaaattgtatatgaactatttaaattctctattccttgagacacatcagcaattagtttttttcgctgcaaatacactgctggaattcggccaaagctaggattaaacggattatccatattttgtccccaatcattttcttatcaaaaaagcagcaggcttcttacctactactcaattttatttatctttttgatgcttaaccacataaatcagtgccgcaataatcaacactgctgcaccaaccgctactgaaatttgcgtctccggattaatgaacatgaagacaacaattactaccagcataatcaaagcaaagtaatttgaatatggataaagcggcaatttaaacgggtgattctccatcaagtgtggattctttcgtctaaagcgtaactctgctagcaggatcacaaaccaagctaccatccctggcaaaacagatgaactatagacaataacaaaaacattagccaatgatttattcaaaaattgggctaacacattaagcataaaaccaacgaaaattccactggtaattccaatgatcgcatgactaggcacgattctcttagatacgtgaccaaaagtcttaggtgcttcaccttcgtgtgccaatttatacaacattcgacttgatgaataaattcctgagtttgcaccggacaaagctgcagtcaaaactacaaagttaattactgaagctgccgcggtaattcccaccttggcaaaggtcgttacaaacggtgagccaatgctatctaatttattccatggataaattgtgacaatcacaaaaattgccccaacataaaagatcaaaatccgccacaatactgacttcacgcttttaacaatggccttatgcggatcagatacttcaccggctgaaatcccaattagctcaattccttcataagaaccaacaataatggccattgagaaaaagaagcccttgagaccaccagtgaagaagccgccatgactccacaggttagaaaagcctactggatgaccgccattaccaaagccaaatagaattaccgcaaagccaagtaaaatcattaagataatcgttacaaccttgatcatggcaaaccagaattccaaggttgcataagctttcgcactagctaagttagccaccagcaaaaataaaataataattacgccggcaacccaatcagaggtgcctttccaccaaaagcgcaaatactctgttgttgccaccacctcagaaattccgacaacaatgtattgaaacacgtttgcccattcggctaaatagccggcaattggatgcacatgctctgaagcatagtctgcaaaagaaccagtacctggatcaacataaagcatctcacctaatgcccgcattacgatatacaaaataaccccaacaaaaatataagctagcagtactgaaggaccggtccacttaatggttgagctagcccccatgaatagtccaacaccaattgctcctccaagtgagatcatttccatctgtccggctgtcatcgaccgctttaattcaggtgctttcttcgccatttccaactccctttctttagcatctgtaaaaatttcctaggaaatatatctattctcatttatctttaatcactataccttatcattttttcgaacaaaactgtagctgatcgctaaaaagattgcaaataaaatcgaaataatcaaagccagctgcgttgatttgataaagaataataagattaaaataccaatgtaaaaggcaagcgtaagccagctagttactgggtagcccggcattttaaagctgcctaaattctgcttattctgtttgcgataaacaatatgtgctgccataatcatgatccaaacaatcacaaaacaaatcgttgaaacagttgagacaacggagaatatttctgctggcattaaatagtttaaggcaactactacaaataaaattaatgaagaggtcatcaaagcgttcattggaattgcttttttggtcaattcacctagtcttttaggtgcatggccgttacgtgctaatgaataaagtgatcgactagttgaaaagattgcactattagtcgctgacatagctgcagtcaaaacgacaaaatttaaaatccctgcagccgctgtaacaccgatgccggtaaagacctggacaaagggacttgaagtagttgtaatgtgattccatggataaacagacataattgccaacattgagcccacataaaaaaggccgattctaactggcaaagtgttaattgccttaggaatatccttttgcggattagctgtttcactagcagtttgacctacaatttctaccccaacaaaggcaaaaacaaccatttgaaatgataaaagaaagccccaaatcccagttgggaaaaagccaccatgattaactaaattagttagtgaaacataaccgccctttatatgcgtatgaagtaacaacattacagcaccggtaatgattaagactacaattgccattaccttaatcattgagaaccaactttccagttcaccaaataatccgacatttaccatgttaatcaacatcaataagatcacaattactaaagggccaacccattgcggtagccacggaaaccagtatcttaaataaattcctgtcgcagtcaaatcagccatagctaaactaagccagcaagcccagtacatccagcccgctacaaattcggcacgcttacctaaatattttttgattgactctaaaaatgaatgactatcaggatcggctaaaataagctctcctaaagcacgcatcataaaaaaggtgataatccctacgattaagtacgacaaaataattgaagggccagcactatgaatggctgaaccagaacctaagaataggccagtaccaatggctccccctattgcaatcattgttacgtgacgactcttaagcccgcgttttaatctcggcttctcatccataattactcacaccttcctcaaaataaaaaatggagcggcatgttttttaaatgaaacatgttgctccatcaagtttgctttttttgaattatatagtcttataccaattcatgcaattattttttatctaaaaaagatattcccttaggaatatcttcattattagtaaactttaaattggttcaacggccagtaacgtactttaactacgccaacgatactactacgcttaatggttccgatataacggctatccttagaaacgctccggtgatcacccattacgaaatatgttcctttcggaatgcgcccagtatcctgcacatatttaatctgcgctctagtaaagtattgctggtaagtccgcgcccgcatcagtgactgcatagtaaaattctgagtctcagaataaaatgtatctgagccattatcaattaacttcgttccttgtttcaaccaaggttgagcaatctttttattattaatgtagatttgattatttttgctgacgattttttcaccaggcaaaccaataacacgcttaatgtacaaagcacctggttcatctggtgctttaacaatcactacttcaccacgcttgatttgcgcatgacgctcagcgattagccgatcaccattttgaaaagtaggttgcatcgaaagacctgatactgtatcgttgctcaagacgaagtggaaaagcagcagataggcaccgatcaaaataacccagataattaagatatctaggaaaaacttaccccatgattctttttcttcttttttctcagccattatttttctccatttatctttttccacagtttacaactttatggagaaattgccaaattacaaaaaagaggtatttcctcggaaatacctcttttattattaatgactattaattagtcttcttttttgtcttcagttttagcttcgtctgaaacttctaccgttacacccttcttagcaagaacatgagacatcttcttcaagtaaatgttaatgatcttgcccatgtcttgttcagtaagtgagttgaatggaacgattgcgtccaaacggttcaagaattcaggtctgaagtagttttcaagggctgagattaacttgtcttggtcaaccttgccatcttcaagcaacttgtctgagaagccggcgtttgaagtcataatcaagatagtatccttgaatgaaacagttctaccttgtgcgtcagtcaaacgaccgtcatccataatttgcaataatgcgttgaagacttgtgggttagccttttcaatttcatcaaataaaattaatgagtatggttggtgacgaaccttttcagttaattgaccaccttcaccgtagccaacatagccaggtgctgaaccgatcaacttgttaactgccatttcgtcttggtattcactcatgtccaaacggattaagtgttccttgttaccaaataattgaattgccaattgtttagcaagttcagtcttaccaacaccagtaggtccagtgagtaagaatgaaccagtaggtctgtcgctgtctttgaaaatttgcttacgagcaatagcgtcagtaattacatcgatagctctgtcttgatcaataacattcttcttaagtttcttagctaagtccaagttcttttgagcttcatcagcgtgaagttcactcattgggatcttagtcttttgttcaataattgcgtagatgtctttttcagttacttctggagtattcttagaatctacattcttaagttgtttctcaagttcagcaatcttactcttaatttctgaagccttgtcgtaatcctctgccttagcagcttcagtcttcttagcttcaagagctgagatttggttctttaagctcttttcatcagttgattgtacaagcaatgccttcttagcaccagcttcatccatcaagtcgatagccttgtctggtaagtaacggccttgaatgtatctttctgataattcaacagctaatttaagactgtcgtcactgtattttacgtggtggtagtcttcgtacttcttctttaagccttccaaaatcttaacagctacatcagtagatggttctggaacttgaacagcttggaatctacgtgataaagctggatctttttcaattctttggaattcactagtagtagtagcaccaattaacttcaattgaccacttgccaaagctggcttcaagatgttagctgcatccccattgttgttttctgaatcagtagaaccagcaccaacgatgttgtgaatttcatcgatgaataaaacaatgttaggatcgctcttggccttgtcgataaccttctttaatctttcttcaaagctaccacgaagacttgaaccagcaaccatgtcattaatatttactgaaatgatatgcatgttagccattttagctggtacattacctgaagcaattctttcagctaaaccttctacaatagaagtcttaccaacaccagcaggtccgattaaaacaggattattcttcttacgtcttgaaagaatttcaattacgttatcaatctgttcgtcacgaccaattactgggtcaaatttattgttcttagcttcctcaactaagtcaacaccaattggcttttcattgggttgttgtgggttctgttgaattgtttgtggtgcagcacccatgctgctggagtaattaattggaattgaacctgaactgcctttgctatttcttctgctaccaaagtcgtcattaaagaatgagctattcaattcgttaaataagttatcaaaatcattgtcaaagtatgccatatgtgcaacactccctatctcaaatttacgtctttagcactctagcttatcgagtgctaactcattacatttaatagtatagcaggttatccacagactgcaagctaaaaaacaaaagttttacacattttcctttatttttgtgatttttatttaaaaaagcactacaaatgctgcaatataaacatttgtagtgcttcacaaattataaagaatttcttaagatgggcaaaaattgatgattattttgcttaaaactgttgaattttaaggaagttttccacagataagaataagtttattaccataaactatttctgcctacctctattattgcccttttgcttgtccagtattttgcggttcgctcaactttctcggcccaagaaaatactgtttaattactttgattacctgcttattctgaggtaaatccgagtgatccgcttctacacccgttactgtcattgcagtatagctcttgacttgattctgaaaaatatattttccggctgctacgctagcttctggtacaattccatcagactcataattttttccaccagataaggaataaacaatcaagtttttcggtagtttatctttgttcttgataaagttttctagcatttgcgttttatgattaatatttttttcaccaaaattatatggcgttcctagcgtcatcagacgtttgattttaatttcatcagaatagtaacagtagtaatgttctaaccaataggtccagatcaagccaccgttagaatgcccaaaggctttaaaattattaaacttatagctctctgataaggcataaaaggcttgatcaaaccagctggcttgcttcttaatattgctataaccatcgtgattattttcaaaaccgacaataatgaaaggttcgttgtcgtttttattaattttgcctgaatatgacagcgttccattcgttgaaactttaattttaagcacgctatgcttagtcggtgtgttctgatttagctgcttcactaattggttaaaacgttcagtcgttgcactagaacctggaatcataattactggtgacaaaagcgatttgcgtctttcagctctagcgtggttatcagccttcatccaagaataacccggaatagccaaagctactaataagactaagacgattgccaaccatttaaaattaggattttgaactaaattaatcatttttttcttcataatcctttagtcccctttcaagtcgcaaacctaatttcatagttggaataaacattattatatccaaaatgaataacaaaatagaaaataccaagttgctccaatcaccattggaaccaaagaaagagaccaaaattcctggtgtcccacttaaaacggggtaagcacaaggttgaattaaatggcaaaaaattgctccagcggctagtagaatattaataattggaataatcacaatcgccggcagtaacaatggatttaaaataatcggcatcccgaccatcatgcctccagttgagcccaaagctgctggaagcaggttaaccttggcaatattttcactatccttatttttactataaattaggataattacaatcatcgctaaaacaatactcgcaccacccatttctgcataaggataaaacaaagaactacccaaatacttatatggtacattccaagcactcccatgttttaaggcaaaatttaagttagctgctgctgaaatactattagaagtagttgacaaagaagctagaggataacctattcccatccagctaagtaaaaagactgggatagtcagtaaagctattaacaaaatattatttgattcctgtatttgagtaactaggcctttaaaagtactagaattcaagaatttgatttgaaattcataaattataatccccagaactatcccacaaaaaattgcaaatattgtcgggataaacgcattccaggctctttccttaattctagcggcatgttcaaaatcgactggcttgtgttcctttcctagccaatgaaaaatttgccctacaccatagccaattaacaaggccagcaagacagcattaatttttaaaacactggaagaaaatggtgaatgatcgctggcattattagctaaattattggcataagcacaaaacatgataacgatgacagccgtcatcccggccatggttgaatctttacggtataaacgcgcagtataacgtgccgcaaaataagccgcataaataccaaataagccgaaggttacccgaaccatcccccgactgacaaatgctcccgcataccaaaaacgatctggcaaagtgatatcaaaattaaaaatattgtaaataaaactatcgggcgaaaaaacggcatctctgaacaacttaaaatatgccccaattaccgcgatcggcatcagcataaccaacgttcgctgaaaaattctaaagattgccaatcttcttagtttaagaaagatatttgtgattctgtttaccatggtattttcctttacctatctattctaaatatgattgaataaagttaattaaaacaattattaattatacatctatactagaaagctgattatgatggcttacattaacttaaaaaataatactaaaatttaccaatctggtgacacaaccatctatgccaataagaacattactttttctatcgataaaggagaactagtcattattctcggctcatcaggagctgggaaatctactttgcttaatattttaggcggaatggaaccaaatacaagtggcgatgtaattgtagcgggaaaaaatattgcaaaatataacgctaaagaattaactacctatcggcgcaacgacgttggctttgtttttcaattttataatttgattcccaacttaacagcaaaagaaaacgttgaattagctgctcaaattgtccctgatgcgatgagcgccgatgatgccttgcagtatgttgacctagggcagcgagaaaacaattttcccgctcaactatcaggcggtgagcagcaacgtgtggcaattgcccgagccatcgctaaaaagccagccttacttttgtgcgatgagcccaccggtgcccttgactataaaacaggcaaacgaatcttaaaaattttgcaaaatatgagccggcaaaatggctcgacggtcttgattgtaactcataacgccgctattgccccaattgctgataaggtcatccgtattcacgatggaagtattcaaaaagtccagcataatctacatcccgctgatattagtacaattgaatggtaggtgggcgacatgcaaaaaactattctatggaaagatgcttggcaagcaatcacccattcacttgaccgttacattgccattattctattaattgcactggggacttttgcctttacaggtttaaaaatggctggtcctgatatgcgagcaacaggggcagaattttttgccaaacataacttagctgacgtcactgtcacttcaaactatggcattaattcaactgatcgccttactattcagaatttaccggaagtaaaagaagctacttttggctattttcaagatgttaaaattaaaaatcaacctgatacgctccgcatcttttctcaatcagataatctttcaagttatgaattgattaaaggtcattttcctaagaataaaacagagattgcactgtcatatttattgcagaaaaaatatcgcttggggcaaaacattacttttaataaacctggcattttaaaaaataagacttacaagattgttggcttcgtcaaagctagtgagttcttagataaaaatccaatcggtcaaaccaacattggcagtggccatttaactggaattgcggttgctaatcataacgccttcgccgcaccagtttatcaaattgcccgaatcattttcaaaaataccgccaatttaagtccctttggcatagcttaccgcaaccgtgtttataacgatcaaaccaaattgcaaactgctttaaaccaaaatcgagccgacaaatatgacaaatatcgggccatgtatcaaaagcaatatcgacaagctgcagctaaacaattacttaaacgtggcatcgtagttaacccggcgcaaatcaaagtaccacagaacaagcttaaaattgcttatcctaactacgtaatcaacagccgtgaagaaagtcagggttatgcttcttatcgagcagattctgaacgagttgaagttttggctaatgtctttcctgttttcttgtttgctgtagcggctttggtcagcttaactacaatgatgcgttttgttgaagaagaacggactaatattggtacgctaaaagcactaggctatggtaatggagcaattgccattaagttcttgctctatagcacctcagctgcaattttaggtgttattctgggggctagcttaggttacacctttttgcctaacttaatcatcaaggcctatttagctagctcaaccttaggaactgattaccagctgaattttgcttggggaccactattaatttcattgacgattgcactacttgcaacaaccgtcgtttcaatgattactttagctcaaactctgcgtgaacagccttcagctttacttttacctaaaccacctaaaaatggttcacgtattttactagaatatattccatttttatggaagcacatgagcttttcagctaaggtaacagcccgcaatattttccgttataagagcagaatgctgatgaccatcctaggcgttgctggttgtactggattactagtaatgggatttggtattcgtgattcactacacggaattggcaatattcaatattctgaagtacaaaaaaatgatgtcatcgctttgaaaaaccgccatgttaacacgactgagcgacaaaaattaaacaaaatttttaccagccatgatgttacgcaaactactgctgtacaatatcaacaattgactaaacaccttgatagcactggagcaactgaaaatgtaatgctaattgcgccacaatcaactaaaaactttagcaaatctatcaatttgcaagaacgtcaaagcaagaaaaaacttgttttgtcaaataatggtgtagtcatttcagaaaaattagctactatcttgcacgctcataaaggttcaacaatttccttaaaaaatgaacatgggaaactacttaagttcaaagttagtggaatctgcgaaatgtatctcggtcactatatctttatgagcccagctgaatatgccaaagaaactggcaaaaaatttactactaatgcctatttagtaaccatggccaaacattccccaggaaatatcagccatattagtcaaaaaatgatcaaaacaggcgcaatcgaaacggttgtctcaacttcatcaaatagaaaattgctgagcagtttcactggtagtctaaatgaagtcattctaatcctaattttaatttcagggatgttggccttagtagtcatctataacttaactaatatcaatgtcgctgaaagaattcgcgaattatcgaccatcaaagtgctaggattttacgataatgaaacaacgatgtacatttatcgcgaaacaatcatcttatcggcactaggaattatcgtaggctttggctttggttggtggctacaccactttattatcactagtttgccaccagatgtcgcgatgttcgatccgaatatgtacccgttgaacttcgtcttctctgcgctaattcccgctattatcaccgctattttagcaattgttgtccatcacaagatcaagcgaatcaacatactagatgccttgtcctccattgattaagcgctgttatgctataataatcactatagaaaagggtggaaaaaacatgccaagaaagcactttgaattaaacagtgatgttaataaattaatcgaaaaatatgatgaaattaataatgttgatttcaataagttagttaacaaggccttaagattctaccttgttaatcaaatgaactacaaagatgttcaagacgccctgaataaagctgataacgaagcttctaagtatattgatgaagcaatgcgttccagcatgggtgatattaatcgaaattattagaacataactaatcatggaaaaagccatctgttttgacagcaggtggcttttagtattcattacaagataatttattataaaaacaactaattgataatttctttactcaaaatgcttataccgataatatcgataacctatctttttaccaaaaatcgtctccgaagttttcatccaattagccagcaaaacataaatgcctaaaaagactaaaccgaagattgctaaataaccaaaactaccaacacggcctaagtcgttgaaacgatagccaaataaaatttggtaaacaaagagcaggataatgtaaatctcgtttgaaacaatgatcggcaacaaactccccatcttaacgccatatgtcttattaagcttgtgataactgagccaaattaccagtaagaatgaaatatcagttgaaagaattgcaccatccccattcatgaacatagtcatcggtacttgcaaaattatttttactaagacaccttcaaccatatagatcacagccagtttgttcatgttcaaagctaaaagcagtgttaatgaattcatcaccaaaccagcaaacaaactttgaacaatattttcaaccaaataatacgcacctaaactatcgtgtgagaacaagaccgtataaattggagaagccgcaaaagcaccaagtgcaacaaccggaagcaagacaaataatagtagtctatagttctctaaaagcagctttctaatgctttcttgactatcattagccttatacttaagccctgctaaaagcggcagactagtctcagaaacggctgtcgcaagtgaaataatcaccgtggtaatcttgcttggattagccgagaaaattgtgtacaagtaactaacatagcttttactcatatgactgaagctaatcaggatttgtttaaacaaaagttgatcaactaattgcgtaacagtaatgaacgatcccagcaaaacaaacggaattgaggcataccataagttaagcaaactacgagaaacattattaagtgctctgggctcgctattttcaattaattctcggtaatgtccccactgcttgcgcatatatgcaaaaagatacaggtaactagctatagcaccaacacaggcgccaaacacactgaaataaaccgccgttacgtaatcatgatggaagacttcaataatcaacaaagtagccagcaaaataaacaaaattcgagcaaattgttcccataattgggaaatcccatatggcttcatatcattatttccctgaaaccaacctcgaaccatactcattgatggcagaattactacggctggcactaatactcgaatagaaattgttgcactagccactgaatccactggactatttttggcaatcattggtgccgtcacataaagcaaaataccacacgctattcccatgaccagcataatagcgaagcctaatttggtaatgtacaaactgtctttatatctattttgcgaatttaattgcgatacttcccgggcaataactgaaggaagtcctgccgtcccaattgataaaaacagcgcatacggcgtatatgacgaattgaacagcgcctgtgcgtttaattggttgtggtagcttcccagcataattagccaaggaatcaaataaacaaccccgagaattctagatacaatgctaccaaacgatagccaaaatgaaccggataggatttttttattcaatagaatagcctcaaatctacgttagtttctcattgtgccttcttattatacgtggattttataactttgtgggaaatatgtaccaactagttacccttttttaacaaatttttcggctctaataatacaaatcagttacattatttactatattgttacccagcctttaattttacgttagaccccttgacctaaccttctttaattattatccttaaaatgtttctgttaaaggtcataattagacaaaaataataatgtattaagaatattcatcgggggaattaagttgtcattcaagaaaaagattatcactaaattagcttatgttgctatgctttcaactactggcgttgccgcagctgcaatcgtgcaaccacaagcacatgttcaagcttctaccacttcagttgctgctcgctcactcggaatcgatgttgctagttaccaaagtgctgatctttcagctcacgctaaaagcggtgctaagtttgctgttgttaaagtaagtgaaggtaccagctacagaaatcctaaggctagtgctcaaatcgctagtgcccgcgctaagaatatgatgccaatgggctaccactttgctacattttctgctaatagcgctgctgctaaaaatgaagccaactacgcaatcgcatcagctaaggctgttggtcttggtgctggctcataccttgcatgtgactatgagtcaggtgacggcaacaatatctatggtggtaagaatcctactgctaatgcaattaatgccttcatgagcaaggttaaagctgctggttacaagccacttctttacgctagttcatcagttttaagaaacaacattaacactaactctgttgttaacaaattccctaactcattatgggttgctgcatacgctgtttcaggtcgagtagacaatcctaactttgactacttcccatcaatgaagggtgtttcaatttggcaatttactgacaactggcgtggtcttaacgttgacggtaacattaacgttttacctcttacttcatcaggtagcgctgtttctcaagcacctaagaaggctcgcgtattaaagaagaaggctcatgtatataacaaggctggtcaccgtacaggcaagactattaagaagggcacttctatcactacccatggcaagaagaaaactatcaatggtaagaaatactacaagattgccaagaatcaatacattagatcagctaacctttactaaaaaggcaaaataagtcatcaaaaaatgcaccaggtagaaattacctgatgcattttattttatccaattttttacttggcgaattgttcaccagctaagttacggtagaagttagccttagcttgacggtaatatgggttaacccacaataaaccgatcccgcaggaaataataccaagtagccaccagccgatgaaacttaaatcaaaaataaacaagtccatcttatggccatccatcaacttacggctggcactgatagcttctgtggcagtcggctcatgaccactatctagcatgtcacgcaagatatatggtgtcactgcatatgaataagccttgatcagccctggaataatcagtaaccaagtccacaaaataagaaaaatttcatataaaatataagttaaaaagttactcttaaagtttctggtaaatggactaaagatacctgaaagaacattttccttagtaccactatctctaaaatgcaagatagtataaattacgccccatgtgattaagccaattgcaactgaaactaccaaagtaatcagccatgcaaaaggattaactcttactttatctaggtacatcaattcagcattgttaccgaagcggcggacaataccgtacacgatatcttcgcccttttcaaaaaagttttcgatatcggtcaaaatataaacgattagccagccaacaaatgacagcaaaactgcccagccccagttaccacgtaactggtctctagcttgttcttttaattcttttcttgtagtagccattttctctcctcctcacttttctaatcatgagtattgtcgcctaaaatcagggcagaatcaattaaaagcacatcaaaaaagcctaattccaccaacatcggaactaggctcacacagtgttgaccgccactctgaccacatatagaagataacattttcgctaccggagaaaatgactactaatagcgacggtacatgatagattttagcattcaactacctaaaagacaagcgaaaagacgtgttgaattagcggaatggataccaaaatttacggataaaaaagacgaggtctaaacctcgtcttcttcattactaaaattcaagcatcatcgtcattgcacgattgatcttctttttaatctttttaaactcaccagaagcagtatgattatcctgcaaaatgatcatgttctggccatctttagttgcccgcataaaggtataatacccttcaccagcaccattagcagctttataatgctttaaattataaagtccaccattataatagctaggagcctgacccttgaacagaacttttctactcttgttagtcaaaatcttaccagcaagaatatactgcatggtcttagctaaatctgcgttagacattacgattgaaccagcacccagctcattgtgagcatccttaacggctttagcatggttcactttgacatattcaccctcacgcatttcatagcctggtacccaatgactagccaataacttagccttgtctgaccacaagaactcactatgggttagcttcagtggcttgatatatgtgtcatggaacaattgctcgtatgactttttctcaagcttggacaagattccacaaaggaaaatatagtttactgaagtatagtgccacttacctaatttgctagcatcaaacacagtatattgtgcatcatgcttgatgttcgcttcatcagagataaactcaggcgtacctaattgttgaccagctttcaaatccagccctgatgtcatatcaattaagttgctaatcttgactgaactagcaccatctacatttgggtagaattttgaaagtttatcgctaagcttcaactttcctttctctacctcatgcatcaccattgcagctgtcattgacttttgaactgaattgatcaaatagctagtgtcaggtttattgtccgtcgcataattaagcaaaactttgccatgatttattactaaaactgagcctttaacgcccacatggtcaatagcctggcgcactattccgcttttaaacggtctttattgcttaaatcaactcgtttaacgttatccttgttttgccacttcttggagtagaagtagttagacatatcatagtcataacgcttattaggttccttcatgaatggacgaacagcttgatcaactgcaacccagcctttccagcctaggtgaatagtatcttgcataaagtacttttcattgcctcgtcttgaaagatctgcaatattttcaaagccttgactggttaactggtgttccatcttagcaacagactcttggtacatcttgctagataaaccagtgtacttcatccacttgccattaattggtgggatgataaatagcacattagtgtgttgcttagcaaactgctccaacatcaattggagatcaccatattctactgaatgtacatagtcaaaatcacgctgactacccttcaagcgtttcaataccttctttggtaaacgtgttctaaagaaggtattatcaatacctaagttgtttgagttagtgtgtatagcagcttgctctgctgcaaccttattcaaagcagctacagaatacttgttaggtaaaaccttagctctcttttgaatcttatttacacgatcacgcaattggaatgagctgaagaaattatcttcgttacgcaacattcgacgacgattttgtaaataaaatttttggaagctagtcaacttcttgccttgagcaatttgcttaaggctattcttgatctcgccctttacatttggcatttccaacagacgtttagctgcataacgatcagttttattattcttggcactaagcaagaaattacatgcttgcaatggtgaataatacaatgcaaaggcattaggatcttgaccccgcttagtaaaccattgtggtgaaatgatcacaacagccttcttgtttctaagctgcttagctgttccttgcatccccaagaactgagccaaagattgactacccggtccacctaataagaatggacggtagtttctatgatacttttccgcaattacactagggtgaagtgggtcgaatcttgacaactcacttgaaccatagaatggcacgtagccatcttcaaaagcttcctgcttcattgtgctgcccttgaagacagttgtgttttgtgaagctgcagcctcgtaaatcgtttgcttagaaaaagttctttcccaaggaataaggaaaacaactaacaaaaggataaaagcgcaaagaactgggccaaagatttgccacagccggcgtttattactcattttctaagctttccacctttgccacaatcttgtttggagtgtcccattcttcacggttaaattctgaaacaggaacatcaatatcaaacttttcttgcaagttcaaaagcatttgtacacttgccattgagtccatcaaaccattgtcaaagatgttttcatccatttggtctgataaatcttcaccagttaagtcatttaaaatatctaatacgccttgttttgtatccataattaatacctctcaaaaaacaactcaatacttattctacttccagccgaaccacagttgacttaggaaccctgagaaaatcaagaaactgaaacatactacattgaaggttaagaaaatggcgaaccatttagtaaacttgttagatggaatttgcttcttatgctttctcttgaatctaagccacatatcgttgatacaaatagctgaagcatggaagataccataaacaatataataccacgttaagccatgccagaaacccatgattaagaacaacaggaagtaagaaacttgtgataatctaattcgattcttaaacattttcttcttcattgcaaagaaagtgaatcgcatgtagatgtaatcacggaaccagaatgataaagtaatgtgccaacggttccaaaaatccttaatgttcttagaaataaatggcttgttaaagttcattggtgtatgaattcccataaagtatgagattgatacagcaaacaatgagtaacctgcaaagtcaaagaacaggtacatactgtggcaatacatgtaagctacaagccaccatgatagcttcaagccgccatttgcattaccaacggctaaagcagcagcactgatctttggtaacaaataagtgccaaagaaccaaccaatcacaaatttgtataaaaagccttggaataagtatctaacagcatactgcatatctgtaatgtatgcatcacgcgtaggtaccttatcataatcttttttaaatctgcggtaacgatcaataggacctgacgaaatagttgggaagaaaagcaagaatcttgcgtaagtaacaggatctactttcttaattgccccatcacgcatttccataataacttgtactgtcttaaaggttacgtatgagattcccaagaaaccaatgacaaagccaattgagttatcaggaaaagcggtcaaatatttaactgcggctaatggaataattgccaaaatcacagccaaactaaagatccaagtcttatttttaccgtggtgacgataatactgataagcaaaggttaaggcaaattcgtaaaccaaccagattaataggttaaccccttgctcccagtgatcaccatcaaaaatcaagaacaagaaaacaattgaaaaaattgcttcatatgtcttgagtcgatgaccgtaatatagcccaatgataattggaattaaagcgatcatcaaatagatgaaatattgcggattagaataaggctgtaagttaatgaaattaaaattcactacttattaacctccttaattaccgccttaatatctaccttaccattttgtgaaataggtaatgcatcttggtagatgtaacgctgtggaatcatgtaaggcattatattcttagctaagtcttcacgaatcatcttagttaaagcagcttcagaatactgacgacgaacgccttcttttaattcgatttcggcaacgatctgcttaacagtgtggtccttattgtacttaggagcagcaacgccataacggacaagcttgttcttagttaagtagaaattgatttcttcaagttcgattctgtaaccattgaacttgatttggaagtcaattcgaccgcgataaaatagcatatcgccatcaaagaaaccagcatccccactccggtagctacgatactcagcaccatcttcatggaaaaaggcagcttcggtcttttcaggattgttcatatatcctttagaaacactaggaccactaatgataatttcaccttcgccaggcttatcacccttagaagtatcaattgtaatcttagtgtcttcttttaccttaccgattggcaaacggtcatactttttaagaacttcatcagtaatttcaacttgagtaacagcaactgttgtttcagttggaccataggtgttgaaaatatgactatctgggaacttcttcttaagcatctcagcttcactgtgtggcaattcttcaccacagaacaagaaatgacttaagtctggatggtgttctgcatcaaaagtcttgtccaagaagcacatctgtgcaaatgacggagttgatacccaaacattgaactgcatctttggcaaagtttggaataatttaccaaagttttgagtaacatcatgaggcaaaactaccaacttaccagcagaaacaagtgctggataaagactcattactgacaaatcaaatgagtaaggtgcttgtgccaagaaacttggatgttctggcaaattaaagtctgacaactcccagttaacgaaactaagcaaattgtcgtgactaatttgtacacccttaggtttaccagttgtacctgaagtaaagataatgtagtagttctcatcaccttcaacgaagttcttctcgtcaacttcaaaattgtcgtcttcaacttcgctagccttaagaaccttaacatcagttaaatcaacttctggtaacggatcaatttccaaaactagtggtgacttagaaacgtcttgaatcatcgttaaacgttctgcgttagaatagctagcaattggaatataagcgtgacctgacttaacacaaccaagaaaactagcaatcatttcaaaagtttgtccgccccaaatcataattggagcatgctctggaatatctaagctagcaattttatgtgcccacgcatttgaacgctttttaaggtcaccatatgtattagtttcaccgagatagtcgtaaacaacacgatctggttcgtttgcggcgatctcatcaattttcttaataacatcttgaatcatgtgatagcacctaccttaaaattcattataaatgaagtgaacagatgttagtccactatattcatataaatagataagagccatcaggattccgaaataaacaattgttttcaaaacaaacataccaatacgtctgcctcgagaatcaaccttcgtctttttattcattttttctcctttaggtaatcttacttttgcctttgccctatattactacaaatagtggcaacaaacgcactaacggcttatattttaacaaatttaaactttttcttaaatcttcagttatttgtttcaaattgcgaatgcgttttctttactgttgtctcttgcaatcccgataagcaaaaaataatggaataaagataactattgccacaaaaatcaaagcaaagatcattaagcgccatacattctgtggtttagtccacattttactctttgccgtcgccaacaaaaatgccgcaaataaagcaataacaattacttcaaccaggcaaaaaattaaatgagtattttgccagagatataagtaggttgttgccggaaataaacaaaaccaccctgaaaagcgtaaaagaaagatttcttttttacgataatctactttcattatagtttcctttcctcattaactgccaaataacgcattaatattcaccgacaaaatccggtccataactacaatttctggtctggcgtagatcttagagcctgattcaaacacacatagtagttgtcccttataagcggtaatttgctctaaatatggcggcatggtaattaccagttctgcattcttttcgtctaaagcatttaaagctgaagttggaaaaacgtagagcttggaatcaccactaccataagattggctcaaaaaaattttattttggtaaattgcaattccttgaatttgcttatccattgaagtttcgccagttggatcggaccattgcagcgttccggtaacagatttaacttcattattagtaattgagccacgatttttaccactacgcgctatagtgtaagccgcaacttttcctcgaccatacatgttaaaaaagccaacaaacaattgaccatcataatatgtaacggtcgatgctttttcaactgcaggaatggcaatttgatatttatacttaattggtatttggctgccctctttataggcccttaattctgccattgaaaatgctgctagcgctgaagatttgcccattgagccagttatccagatatttttggctactggatcataagcaatcccacctaggtgtggccgaccaggtatttgaatcgttttaagatatttgcctgtcttcttatctaagacataaacaaccgaagcatgctcatgttcaccatcataagcagttagcaaaatatacttacctgcaaccgtaatcccctgtggtgtcattgcagttgctgtattgacctttttagttttaaaatcataacttttagtagcaactaatcccggcaaaacaaagtcttttccatcccacgtccgcggtggtacataattggcaactttattaataaaaggatatttttcacgcaatgctttttggtaattggcaaaattatgccaagcaggactagtgcttgtcccatccttagcaattttttcttttggccgttgacggatcatctcctgcttctgccaccattggtaaccgaaatagcctcctgcaccaatccctgcaagcaaaagcagtactagcaggaagcgcaaaattcttttaccaatttttttcaaaaaattactcccttctgtttaggaattgtccctattatgcaattcattataacgaaaaaacaattactttttgtttttaactccttgctataagctttatttactaaaaagataaatttttttgcaaaaaagtgctttcgtcacacttttttcacaaattaaggttatactagtaaatgtagtgaggaagaataatcctctactacaactcaacttttttgtttttcattcatactcctccaagtaaataatgaaaataaaaagaattgacttactccaattagtcaatttcatatctatccctttcggctcacgtgcgttgcgtgagcttttcttataccttaacttattctcaagcaaatctttaccttttcataataaattgaacacttttacttcacatttacccagtattatataaaccgtagcaagatggtagaaacttgctacaatactcccacttttttatttcattcttactcctccaaagtagatcaaagtagatgaaactaataaggtccgcaaaaacttgcgggccttttcctttttcagcacttttttctgtataattaaggtagaaatgaggtgccgctatgttttcaccatcaatcaaacatttaatagaagaaaaatctggttcatttttaatccctgctagccgaattgcctttgtccaagcagacaatcctctttatcatgcctttttgattttgactaaggttaaatattcaaaaattccagttttagataaagaaaaacgagtcgttggcctgcttagtttggaaatgattacggacaagatgctgacgactgatgagatctccactgcccctttagataaattaaaggtcgaagatgtaatgcaaactaagtttgataaaataaacttcgttgaaaccaccctagaaacgcaactgcatctgttaatcaataatgctttcttgcccgttgttgatgatcgcggcgtgtttcagggactacttactagacgcgaatggattaaggcatttaactatgtagttcacacttatgacaaacactacgaaacaaaacgaataaaataacctccaagcagcctttaaggctgctttttttaactccaacatttattgagcaaaaatgtgtccagaccaataaagaatgttagaattaagcggtagacagatatgtttgtattttggggagggcaattatgaaaaatttaaaacgtcaatggaagtttattgtcgttttgattgctggtgcagttggattaattagccaatttgcattgcattcaaagagcctattctcaatcgggaatcttcaatttccagttcatgccatcattattgatatcattggtatcttgatggcaatttctttactattggaaattttccacgattggaagacaggccgttacggcgtagacatcctggctgttatcgctgttgtttctaccatattgattggtgatgtatgggctgaatggatgattttggtaatgatgaccggtggtgaaacgctggaagattacgcaactggtcaagccaacaaggaattacgtgccttgcttgataaaacgccacgtatcgccaacaagttagttgacgggaagatcaccgaagttaaggttgatgacctgcaggtcggtgatactgttttgatcaagccaggtcaacaagttcctgtcgatggtcaaatcgttaagggcacttcaagcttcgaccaatcttcattaactggtgaatcagttcctgtgaccaagaaccctggcgacgaattaatgtccggttcagtgaacgatgatgtagcggtagagatgaaggtaactaaggctgctaaggactcagaatatcagtctattgttgcgttagttaagtcttcacaagctcaacctgctaagttcgttaagatggctgaccgttacgccattccgtttaccgttatatctttaattattggtggtgtcgcttgggctgtgtctggggatgcaactcgctttgcggaagttatggttgttgcttctccatgtccactgttgatcgctgctcctgttgctttggtatcagggatgagttcaatgtcagctcaccatattattgttaagtctggtccaaccctagagaagttggctcgcgctaagacctttgcttttgataagactggtactttgactgaaaaccaattgatcgttgaccaagtcgttactgatgacaaatcatttgatcaaaaagaattgcaaagcttagctgccagtgttgaacaacagtcaagtcacgttatcgctagttctctagttaaggctactgacaaggatttaattcatcccgtaactaaccttaaggaaactaccgctcaaggtgttgaaggtgatgttgatggcaaacacgttaaagttggtaagttatcctttgttgcgccaggtcatgaaaaattaaacgtcacttcaactgctgtttacgtttcagttgacggtaagtttgctggttacatcactttgaaagataagatgcgtccagagagtcctaagactattgaacgtcttcgtcgtcaaggtgcagaagatatcatgatgcttaccggtgaccacaagcaagtcgcagaaaaggttgccaaagaagccggcattactgatgtccgctcagaacttttgccatcacaaaagattcaagctattaaagatgtgccaaagcacctacgtcctgtcgttataactggtgatggtgttaacgatgcacctagtctgaccgctgctgatgttggtattgctatgggtgctaagggtgctactgctgccagtgaaagtgccgatgctgttatcatggttaacgatatttctaaagttaacgatgcagtcgctatttctaaacacacaatgaaggttgctaatatcgatgttttaactgcaattggtgtcgttattatcattgaattgattgccttcactggtgttatcccagccttctggggcgctattttgcaagaagtagtcgacatgattacgatcagcttaggtttacttgctaagactaagccaagtgataagcaatttggtttggaagaaaaatagattagatgtgaagaagctccagaatcgatttggttctggagccttttttcatacataattatgcgtagcactgcaccagttcaatttgcatctaagttaaaaaactattaagattaaactcaactaaataatttttagtggttgggtttttatcacaataaaaactttcaagattcgcttctttgggtcaggaagcacttgaaagttttttgtttttttacagaaggggaaaatatgcattttttaggacaacttatcttaatcctcttaactacagttttgctggggcaattattcgcccgcttcaatatgcctgcagttattggacaactattatcaggaattttactgggaccagctatcttaaattgggttaagccaaatgatatcatcagtctattctccgagttcggggttattctgctgatgttcttagctgggcttgagagcgatctagatttattaaaaaaatacttcaagctaagctttactgtcgccacagtcggcgttatcctacccgttgttttcatgggcttagccagttacttctttggcatgcgccctcttgaagcactctttatcgggattgtctttgcagcaactagcgtttctatctccgttgtggtgctgcaagaagcacaccaactgcacacccgtgccggcacagccattttaggtgctgccgtagttgacgatatcttagccgtggttgttctgagtctattcactacattcagtcatgaaggtggcaagagcggcttaactaataactttttgcttaatatcttgattgaagtagtttacttcgtagttgtttggctgatttttaaatttgttgcgccatactttatgaaagcttctgaaaaaatcgacgttgactattccgtcgttatcggttcattggttttagccttaaccatggcttgggccgctgattttgttggtctttcagctgttgttggtgcatttttcggtggtttagcaattcgtcaaacaccacaatacaaagaagttcactcctctgtttccgcaatcggctactctgtcttcatccccgtcttcttcgctgatatcggtctttcaatgacttttgccagctttttcaaggatatctggttcattatcgttatgaccgttttagctattttatcaaaattctgggccggaaaatactccagcgaaatctttggcttcaataagaatgaaggcaatatcgtcggtgctggaatggtatcacgtggtgaagttgcactgattgtagcgcaaatcggaattaaccaccatctcttccctgaggatatttattcaagtctgatcctagtaattatcgttacaacagttatttcaccatttattttgaattactttattaaaaagagtcaaaatagtacggaatttatgtagaaaaagtctagcattcgctagattttttaatagtttaattttacaagtggcttatcataaacgcaattgtgtctacatggtaaaatcaatagtgagaggtgagaaatatgttacaaactccaaacaatattagagctgttaccgctcgtgacctgcgcaataattttaagaaaattgctgatgatattaatgactatgatactaccgttatagtagctcgtcccaaagataaaaatgttgtgattatttctcaaaaagaatatgattcatggcaagaaacttcatatcttctaggaactaaagctaaccgcgatgcattagctgaagctaaacaatcatttgaaaaccaagatcaacgaaataaagttttaaccccagaagaattcgaggctttaactaaagatgacgaagcttaaccttaattttaactacaatgcctggaatgaatatcttgaatggaaaaaagaggataagaagacttcccaaaagattgataattttattaaagaatgccaacgccatccttttactggaaaagggaaacctgagccattaaaagcgaatttaagtggtgcatggtctcgacaaagtaatcataaagatcgcatggtttattcagttaccacaacagaattacaaatatggcagttaaaataccattattccaaatgaaaaagctctttcgagcttttttgtttaacccaattttcctaaatcgattacttggtcatacttctgcaactcatttgattcatagtggtgaattacttcaataaaggtaaggtttgagtttaacaagtaattatgaatttgatctgatgtcttcttatcaagggatgcattaatttcatctagtagcaaaatcgatctatcggccaaaattgcccgtgctagttctattctagctagctgtcccccagacaattgatccgcattatcacccaaggaatagtcccagcccttttcagcaataatttgatccaaacctaatttttggcacacctcgctcaccttttcccgggaaatatttgcacctaaagttaaattaaaccacaaggtatcggcaaaaattactggggactggctagcataagcgaataaatctgtaaacgagcctggcttttgctttttgtcgttaagcaatatttccttggcatgaccatgctttccggttaataggaattgtaataacgttgatttacctacaccagatggtccaataactgcaactttttgaccttttacaactgcaaagttaatttgattagctaattccttgccttttctagtaagatccagatcttctatttgcaaatttgcaaaattataattggtctctttcttttcaaccttgcccttggcaatatatttttctgccttagcgacaattttcttagttgttgataatttgtttcgatcttctaaaatagtcaaaattggattaagaaatgaatttgacagttgaacgattgcaaataaggcacctaaagtagtttgacccttaaccaccatgtaaattcccactaagaatggggttaagaacgtaaataaactagcaatcaagttaatccaagaattagtatctagattgagtaagttcattttacgcaaagcatcttctaattgattgatcaaaacttgatttttcttaaccgcattatcgcgcttgttgtataaatttaatgttgtgctaccagccagaaagtttttaatatgactaacatatttatcattagcagttgtccaattttctgctgcagtttgaatcttcttttgaaataaattagaaaccagcatcggcaaacatgaaccgattaaaaataataatgtaactaaccaattaacacataaagcataccctagcgcaaaaacaatcatataggcctgcatcattatttcaatttcagcatcaaaacgattagtttccagcagcttaaaatctgtagtcaaaaagcctaagctagcagtattttcttcgctagtctgacccagcatcccctttaaaatgccagctcgcagcgtcgtattagtctcttgaatagcacttgtttttaaccgattgaaaatcagcgaagcaataaaagtcgcaataaacgccccaataacaataactagaaattgtgctaaatcgccaaaccttctttgcgtaccaacattggtcaatgtctgtaccatatatgcaaaaatgatttgttgtgtactagcaatcaagcctaaaatagttaacataatgaattttgcatgtgaagaatatttgtaaatcattttttgtcctcctgtattttacttgaggctagtatcgcaggataatgacgaaaaatgttagaaatttacagatctgcaaatcgaggtaaaacattatgttcaaatatggttcaatttacaaacaattgcgcaaagatcaagaaatcactcaaactgaagcctgcaagggtatttgttcaatctctaagttatcacgctgggaaaataatcaggtagaagttgagtttagcaccgccattgcattactcaggcgcatcaacattacgcttgacgaattcacgcattacgctgcaatgaaaacagaatttacattgccagacgacattataacggccattaaagacaatgatacaaaggtactcgaaaaatttgttcaggagcagctaaatcattatcacgccaacaaaaatattctcgaactcaaaaacatcattcttgtctgcaatcaattatttctcatgactggtaaaaactatctaacacctgcagacattaatcgaatcggttcatacctgcttcacaacaccgtttggtctaaatacaatatcttgctttttgctaactcaccgtttttgctaaattctaaaatcggctatcaaattgctctgcgaattattcacaattttcaccctacagaaagtttaaacgaaaatactactattttcatgggcggtttatctgatacagttattgccttagttttcaaaaagaagctagattacgctcaaaaaattcttaatgaattaaaaaagataggacttcccttctatctcatgttctttagttcaacattgacccttttacaaaaaattatcgactactgccacactctcaacgcacagcctgtattggcaatgattgatgccatagttcagctaaattgcatggaagttgctaaaaaatggcttgagatttttaaagacgtacaacaaatctggccagaaaaagaaaattaaaaaccgtaaaagtaatttactttcacggcttttgacatggtattcattatgcaagcttacaaatttttagcttttaattaatccttaacaacgtctttggtgttcaaccattgactcttgttgatcttaacgatcttcttgccagcagctttcttaacatccttagcggtgtaagttgaacccattgaaaccttttggctagtcttgtgaccttgtgcgtccaaaacattaactttttggttcttagtgtcctttacagcaacaaagatcttgtcaccctttttaattgcaggatcagttggcatagtttcggcaacacctaactttggagcagtaaaactagctgcttgactaactgaagcaccaacacccattaaactcattgaagcaactgcgattgaaacaactttaactaaattctttgaaactaacataatgaatacctctaatttctatatcacttaatttgttggaactttttgttccctcattccttacgtctttattgtataacatatgttattaattacaaggggtttatcgaattttttaaaaataattcagtcgtctcaaagtattgctataataacgattgcggggattttttgtccaaaagcattaaaaaagtgtctgagaaaccgttctttcccaaacacttttttaagcagctgctacttcgtttgaattttgagtcacttttctagtttttaaactgacaaaaatcgctacaattagtgttattacctggattactaataatgtaaccaaagcaacagtaacattgaatgaaccagaaattgtggttaatactgttgtcataattggagcaacagccattaagattgtatttaataagccaacagttgaagccaagattttatgatcaactgatgttactagccattgctccattttaactgaagcaactcctgcaatagctgccaagaaaaacattgttatcataattacgtaagtatttcctaggaaaatgcttgttgtagtaacaatacttaaactggcagaaataattactaaactaaaaactgttaattttttgaataattgtggtccaaacattgaacccaatgcaaagcctgcgccaataaccacaccaaacaaagcaatagtaaagctataagtgccgattagcatagttgaacgatgagctgcaagtacaattgttgtcaatggagtaattgtatctaaagctccatttaataatgcgattactaataccacagtcaataatcctgattgtttcttcacttgggtcaatgaagttttcattgtttggaaaaagttttgatcattaacttcctttttttcaagtggcttctgatccttctgatgttttaagccaacactggcaaataacaaacctgctaacaagaaagtacctgcattaacaaaggctaaagttgagtatgacattactagcaaaagtgctgaaccaatgaattgagcacccatactaataatttgatttacgccgccattaaagcctactgcattcccgtattcttttttaccaacaatatcaacaattaatggtgcaaccaagccacctgaatatgaaccaatagtatctgataagaaattcacaacaacgatgattaaaaccaaattccactgtgacattttagtgataaacaataatcctactaaaccatataagataaatcggacaaatgctgctaaaaagatattgcgaaactttttcttagtcttatcagcaaggtaaccaccaaagatctcgaataattttggaactgattcagaaattgcaattaatgaaagtgctaatgagtagttttgtaatttgctagcataagtcatgaaagccaagtagaaaagaatatcgcctgcgcctgaaagaaaactagctactgaaaatcttctaaagtctgcgtttttaagaaatacgttcataaatcttaccccctttttctttgtttcgtttgttgttgaaattataataaagtgaaaaagaaattaattttaaaaatggcgtattcgacattcggaggataaacctatgacaattggtgaattactcaaagaaaaaagactagcagaaaacaaaactcaaaaagcatgggttggtcatattatcagtacttcttattatgctaaagttgaaaagaatattcatagaattacagcagaggatttattagccattcttaaacataatgatctttcaattactgactttttcgaagaattagcagacaaaaaggatgaactaaaagcacaagtaaactcgctaaataaaacagtaattgatgctgtttatcattctgatgtttccaaagttaatgaagtcattcaaattattaaaaaaatggatctaccgactaagcaaaaacaagaacttatcttaatcaataaggggtttatcgaaactatcaaaaatgatctaagtgacaattatcagccagataaaaacatcgttcaacaactaaaagacaaaatttttagtattcctaattttaatagattcaaacttgaactctatactaatttcatgcaattttatgattatacaactaatattatgatcaccaaacaagtgatccataaaatagatcagtttaagagcgataaagagttattagcaatcgctggtattctattcaatctcctttcacaattagtcgaagaacatcattatcaagaaactgcaccatttatagcagctagtgagcatttaccctttttaccagacttatactttcctcaaaccggaatctcattgctaaaataccttattagttatcattttaataaaaaaacagcagacttagctaaagctgagatgattgcacaaacttatcaaattactggtctagaagactttggtaaaggtgcacaagaaattattaatgaagttaaagaggactagctttaagctaatcctcttgtttcaatctctaaataaaacctaacgcgttatagcacatgtgcaccaaaattgaatagcgcaaatctttggttgacatatagacccaagctaaaaccatgcctaagacccaatatactaagatatacttacttaatgccggatcatgcatatagccaaataaaaatccgcttgcaacaatacctagccacttatttctagtatttttcttagtgaaaaagatattgaaaaacatccctctaaagatatgttcctcacaaaatggcgcgatgaaaactactaggatcctaaataaacctgcattgtattccgctattttattcaagctttcctggttctttgaaacgccgccaccaactagattaagcatcacaatcgaacctactacaatcagtacaaaaccgatcatcgctattccgattctgcgccagtcccagtgtggtgtttcatcaaagccccaatcattttcttcttttaattgcctgcgataaatataggaaattgcaaacaaaactattaccgtagcaagcgccgtaacgaagacgcgatattgcgccaaatcaaatcgctgaggtctaaagtaaagtacttctaattcagaataaattaccaaagccaacacagcccctgcaatatttcccaggtaatgtccaaatctcttcatttttcattcacaccttgattctttcaactagtaatcattgtttctattataatgtaaataagaaaaaatacctaaggaggagtatctatctatgcttaatcagatcatcgcttttttggggagacgcggtgagttcttctacatttcagtctttatgttactgatattttttgcctttttaatctcttggcttatcgaaccaagacgtttgattaatggcgttttgtttactatctttatagtctcaatgctctcttggatcaccgttatggtgcacaaaagtacgagtcacggcttgcaacgtgcctatgacctactagttctagctgcattatttggcattgtcttattattaattttcgcctggatttttctattctggaatgcctatttcgtttggaaatatgaaagccatactttgcctaacttgcttactttaattaccggatttttagcattaattattagtattatcgtgctcttaggaccaggtaagtacttgccacgttggcttagtctcgcattagcttcaattcccgcgattgcaatttatttgggattggtgctttacaactttttggtaaacttgcttctatatcaaatttatcctcgtacctaccaccaagactatttaatcgttctagggtctgggctaatcaatggcgaccaagtatcaaaactgcttgcggctagaattaatcgggcaattcaatactctaaccgccagtatcaaaagggccgcaagcgccctatcctgatcatgtcaggtggtcaaggcgctgacgaaaaaatctctgaagcactcgctatgtctcgttttgcacaacggcgtggcgttagtgttgaccgtatcttattagaagatcaatcgaaaaacacatacgaaaacatgctcttttctaagcgtattgccacaaaagattttggtaattcccacttcagggcacgcttctttagcaataattaccatatttttagagctgctctcttggctaaggaagttggtttaaaagccaatggtgtcggtgcttacaccagattctactacttgcctaacgcaattatccgcgaatttgccggtgtgtttgtcatgcataaacgccgtcatttcgttatcatgggattaatcgttttattctttatcctgcaagctatcttagtcatgacaggattagaaagatttactgtaatttagaaaagagggatgcaatgcttcaactaaagcatatttttaagtcatataaggtgggggacaacatcacccacgctttagacgacgttacaatctcgttccgtgaccaggaattcgtcgctatcttaggtcctagtggttctggaaaaactaccatgttaaacgtaattggcggacttgaccgttacgaccaaggtgacttgatcatcaacggcaaatctaccaagaattttaaagagaccgactgggatgcttaccgcaacaataccgttggttttgtttttcaaaattataatctaatcccccacttgtcgatcatcgccaatgtggaactagggatgaatttgtctggtgtgcctaaaaaacagcgccatgaaaaagcaattgcggcgttaacagaagtgggattgaaagaccatctaaataaacgtcctaaccagttgtctggcggtcagatgcaacgagtagcgattgctcgagcaattgccaacgaccctgatattctactttgtgatgaaccaactggtgcacttgatactgagacttctgtccaaattatgaagttgatcaaaaaactatctaaagatcgactcgttattatggtgacccacaatcctgaattagctaaagaatacgccacaagaatcgttaatttccaagacggtaagattcgtcatgattctgatccttttagccctaataaggaagaagacaaatttaacctcaagcgtaccaagatgtcttactggaacgccatcaagttgagtttcaccaatattatgacaaaaaaaggtcgaactctgctaactgcttttgcttcaagcatcgggattatctcaattgccgtagttttagctatctctaatggttttcaaaagcaaatcaataccacaatgagcaaagctttagcaaaatatccgatttctatttcacagaccgcaactgacattacttcagctaatgcacgtaaagaatcggataaaaatgtcaaaaaccgcggctatgtaacggcagaacaagaccaaagcgaacaggcccaacacgttaataaaattagcacaaagtatgttaactacatcaagaagatcaatcctaattatgccaataacgtgtcttaccaacgcggcgtaagcttgaatttattagctaaaaacaagggaaaaattgaacgcgtgcaattttcaaatacggatcctgatcagactaattctgttctagctgctagatcccaagcgatgagttcaatgggactgggttcaagtgtctttcccactactttaaataaagagaaagactcatttttgaagcaaaactatcaattgctctcaggcacttggcctactaaggcaaccgacttggttttagttactgacaataaaaatactgttaacatcaatgccttaaaaaatcttggtttcgatttaaagaataaggaacacgtcaaattcggccaattagtaaataagcaatttcgtgtagttgctaacaatgattactatcagcaattgccaactggcatgtttattcctaaaaaggtaaataacgccatgtataacggtgctcaaaccaagctaaagattgctggtgtcattcgtcctaaaaacgaagattcaatggccttgttatcaactggaattgcttatagcgatcaactttcacaacgcgtgattaatgaaaataaaaactctgcaattgtaaaggcacaaaagaagagtaaccatagcgtattaactaaccaaaaactaaatgccaatgaaaagaaagctacaatgcagactcttggcggtaccagcatccctactggtatcatgatttatcccaacaattttgatgataaagataaagtacttgattatcttgacaaatggaacaaggggaagaaaaaatcagacaagattctctatactgacatgtcaaacgctgttaccacaatgactggcggcctcttaagcgggataacgaccatccttgtcgcatttgctggtatttcattaatcacatctatgattatgattggtattttaacttatacctcagtacttgagcgaactaaagaaatcggggtactcaaggcattaggtgcccgtaaaaaagacattactcgtgtctttgatgccgaaaccttcatcctaggtgttttctctggtgtattaggcattctgattgcttacctactaacattcccaattaacagtatcatttacaagattactgatctggcaaatgtagcccaactagatcctactgctgctattgttttgatcattatttcaactatcctcaccctcttaggtggtcatattccagcacgaatggctgcaaagaaagatgctgcaattgcattgcggagtgaatgaatttaataaagaatttgttacgttgttcacaataacctaaatttttagcaaaatatgtggtatcttagctttagcaaaaacaagtaagaaaggaacttttttcaccatgactgttaaaaaattagaaaataacagcgatgttaatgtagtggcagaagaaagcaaagttttaactgatttattgaatgaatcaactaagcaagtaatcggtcaagcagctttcgataagatccaaaacttaattaaaatctctgccgccaaagattatcaagaacttgaaaagcaaattgctagtcttaacaatcgcgaaatgattgttgttgcacgttattttgctactctcccactcttgatcaacatttcagaggatgtagaactagcaagtaaagttaatgtgcttaacaatactcatcaagattatctaggtaaattgagtgacacaattgacattgtagcccaaaagaaaaatgccgaagaaatccttgaacatgtaaatgtagtacccgttttaactgcccatcctactcaggtacaaagaaaaaccattttggaattaaccgatcaaattcatcaacttttgcgcaattatcgtgatgtgaagaatggcacaattgatcgcgatgaatggactgaacaaatgcgggcttgcattgaaattttgatgcaaactgacattattcgtggtcacaaattaaaggtagctaatgaaattaccaatgttttggcttactaccctaaggctttaatccctgcaatcaccaaatttactagtcgttacaaggaattagctaaaaaacacgggctaaacgctagtcatgctacgccaattaccatgggaatgtggatcggcggcgaccgtgacggtaacccttatgtaacggctgatacgctagaactaagcgctactttgcaaagccaagtaatctttgaatattacattaagcaaatcaataagctttatagagccatttccatgtctacttcttatatggagccatctgacgatgtaatgcacctatctgagctttctaatgatgattcaccattcagaactaacgagccatatagacgggcattctactatattcaaagccgtttagtgcacactgaacaaaaattactgaatattactaacaagaacactttcttaaagaaacgtgacctccaaaatcttgataaaatcccttgttatcaaaatgctcaagaatttaaagccgacttagaaatcatcaaaaattcacttgaagaagaccatgatcacgccgtagtagacagctactttactcaaattcttgaggctatcaacatcttcggcttccatctagctacaattgatatgcgtcaagattctagcgttaacgaggcctgtgtcgctgagctacttaagagtgctggaatttgtgacaattatagcgatttaagcgaagacaaaaagatcaagcttttactcaacgaattgaacaatgatccacgtaacttacacgccaataacaaacccaagtctgagttactacaaaaagaattaaagatctacaagactgctcgtcaattgaaagaccgtttgggtgaagacgtcatcaagcaacatattatttctcacactgagagtgtttcagacatgctagaacaagcaatcatgttaaaggaatacgatttacttgataatcaaaaagcccgaattcaagtggtaccactatttgaaacggttgaagacttgaataatgcccgggaaataattaaggaattcttaagctttgatatcgtcaagaagtggcttgtttctcaaaataattatcaagaagttatgttaggctactcagattccaataaggacggtggctacttagcttcatgctggaacctttataaagctcaaaaggatctaactaagattggtgaagaaatgggtatcaagattacctttatgcatggccgtggcggtaccgttggtcgtggtggtagtccatcatacgaagcaattacagcacagccattcaagtcaattaacgatcggatgcggatgaccgagcaaggtgaaattatccaaaacaagtatggtaataaagacaccgcctactacaacctagaaatgttagcttcagcaacaatcgatcgaatggcttctaagcaaattgttagcgaagatcatgtcgcagatttccgttcttcaatggatcaaatcgtagctaaaagcaacgaagtttaccggaaactagtatttgagaatcctaacttccttaagtacttcttccaagcaactccaatcaaagaaatctctggtcttaacgtaggttcacgtccagcttcaagaaagaaactcactgacttttctggcttaagagccatcccttgggttttctcttggtcacaaagccgtgtaatgttccctggttggtatggcgtaggttctggtttcaagtcatttatcgatgctgatccagccaacttgaaggaattacaaaatatgtaccaaggttggccattcttccactccctgctttccaatgttgatatggttttatctaaatcaaatatgagaattgccaagcagtatgcggatctttgcgaagatgaacaagttaaatcagtctttgatatcatcaatcaagaatgggaactaactaagaaagtcatcctacaaattgaaggtcatgatgaattaatcgaagatgcacctactcttaagaagagtctggaatacagaatgccttacttcaacattttgaactacatccaattagaaatgatcaagcgtgatcgtgaagatgtgattcaaggtgtttaccaaagtattattccaattactatcaacggtgtggcttccggtttacgtaattcaggataaaaaacacataaaattcagctaaaaaaggctcctcattgcctgttttatcaagcatttgaggggctttttttttaatttattaaactttttagttacgcctttttcataactaagttaagtggcgttacaattactggaacgacaatggctgtaaaaattgcttctactaaaccgttcatgcccagtgccataattaaaattaaaatcaatggcgtacctgaactataatttcctaggtaatgagttaagcttgctggatcatgcatgaagaaaatactcgtcagcaaaataaccatcacggtattagttaacgaagtgactgctccacttatgatataacccaatttcgcatatttagtcttactcatacccttcgcaataattcccgggaaatagccagccaaaatacttggtaccaatgaaattaccggattttggaacaacattaagctgaccatatcgccaggttgagtatatgcaacaatcaatctggtaataccccagaataagccaaagcctagacccgccttttgtcccattaacgtgccatagacggcaattgtcattggaatagtagttacagctggcaaagccgggataattcttacatagccaacatttggcacaaaagtctgtacaatcaataaagcagcaaagacagcagtaattgctaatcttttagtttcttctcttctcatatatttctccaacttaattctttagactcaattaaaccataattaagattttttctcagcaaaaaagtttattatacaatatctaggtatattttatctaatatgacaagatattgtattttttattatttttttacttaattatgcattatccttactctctctaatgcataatcgtgttctataccaattaagaatccctttatatcaatactttatgttgtatgtcaattttgacatagccactaaatattgttaatctcgttttgtgttaaaaatcatttgatggagagaggatcaattttatgaataaaaaagtcaaaaaattactatctattggtgtgcttgcattgagtttaggtgcaattttaaccgcctgctctggtaaaaaacagggtgcaagcaataataaatcaagcgatgccaagcactctattgcattaattactggcggtaatggtgtaaatgataactcttttaaccaatctgcttgggaaggatttcaaagttatggcaaagagcacaacttgagccgcggtcgaaacggttatcaatattttcaatcaagtagtgctgctgatttcactcctaattttgatcaggcagctaaagctggttatcaaactatctttggcgttggttacagtttaaaagatgccgtagcttctgccgccaaacgctatcctaaaaagaattttgccattattgacgatgtaatcaagggacaaaagaatgttgtctcagctaatttcaagagcgaacaagcttcctacttggctggtgtcgtagctgctaaagaaaccaaaaccaacacggttggcttcatcggcggtgctcatggcgatattgtcgacctttttgatgccggatttactcaaggtgttaaagatcaagccaaaaaaatgcacaaaaaagttactatcttaaaccaatatattggcaactttactagttcagacaaggccaaatcaattgctcaatcaatgtacaccaaaaaagccgacatcatcttccatgctgctggtggtgctggtgatggtcttttccaagaagctaaagccattaatcaaactagaccagctaaagataaagtgtgggtaatcggagttgatgtcgatcaatctcatctcggtaactacactgctaaaggtgggcaaaaatctaattttgttttgacatcagtaataactggagtaaatgttgctgtcaaagatatcgccaatagagcttataataataaattccctggtggcaagaatttggtttatggacttaaaaacaatggtgtttctattgaacgaggacagatttcagcttcaacttggaaagatgcccaaattgctagagctaatatcctaaaaggcaaaattaaggttgccattcatcctaacaataaataaaagcatactagtatagtttgctttttataattacaatcaattattttttgcctgatcaatatttttgttgacaaaataccgaacaattaataaacttatttataaattgttcggtattaatattgtggaggacagaaataatgaacgtaaagttcaagaaaattttatcatttggtgtcgttttagcatcagttggcttgattctaactgcttgttcgggtaaaaagtctggtcaatcagccaacaaagatactaaacatggcattgccctaatcacagatgaaaatggtgttgatgatcattcatttaaccaagctgcatggtcaggatttaaagcatacggcaaggaacatggtttaaaacaaggaaaaggtggttatcaatacttccagtctagcagtgccgcagacttcactcctaactttgatcaagccgctacagccggctaccaaaccattttcggtgttggctatcaattagccgacgcagtcaagcaagcagccaagaagaatcctaaaaagaatttcgttatcattgatagcgttgactctgggattaagaacgtcgcttctgcaacctttgaaagcaatcaagcttcttatcttggcggattggccgcagcttacaccactaaaaccaacaaagtaggtttcattggcggtgctaagtcatctattattgatttattcgaagccggttttaagcaaggtgttgctgacggtgctaaagctcttcacaagaagatttcagttcaaacccaatacatcggtaacttcacttcaaccgataaggctaaatcaatcgctcaatcaatgtatgctaaccgcgctgatattatttaccaagcagccggtaacgcaggtaacggtgttttccaagaaggaaaagattacaaccaagcccgtccagcagctaaaaaggtttgggtaatcggagttgacgttgaccaatctaacctaggtaactacaagtcaaaagatggtaagaaagagaacttcactttaacttccgtcttaaagggcttagatgttgctactaagtcaattgctaatgatgcttacaatggtaaattccctggtggtaagcacttagtttacagcttaaagggtaatggggtttaaatcaccaaaggtaatttaaacgctaaaacttgggcagcagtacaaaaggctcgtcaacaaattattgatggcaagatcaaggttgctactgctccaactaagtaattcagctgcttagtattttgagaactcttcgttttttagcgaagagtttttctatagttaattaaggaagtatttatttacatgaaagaacagagaaataaagtaatcgagatgcgtcatattgtcaaagatttcgatggtttcaaggcaaatgacgatattaaccttacgctctatcaaggtgaaattttggctttgcttggtgaaaatggcgcgggtaaatctaccttaatgagaattttatccggcttgcttgaaccaacaagcggtgaaattctggttaataatcaaaaagtaaatattaaagatccaaccgtcgctaaaaagttaggcattgggatggtacaccagcacttcatgcttatggactcatttaccgttttagaaaatattattctaggacatgaatcaactaaaggaccagttatcgatctgaaaaaggcaagaaaacaggtcctagctcttgcacaaaaatatggctttgctattaatccagatgccaaaatctctagcattactgtcgcccaacagcaaagagttgaaattctaaaggtactttatcgtggtgcagatattttaatttttgatgaaccaactgctgttttaaccccacaagaaatttctgaatttattaaagtactcaaaaatttagctaaagaaggcaaatcaatcattttgatcactcataaattagaagaaatcaaggctgttgcagatcgagttacagttatcagacgtggtcacgatgttggtacttttgctgttgatcaagttagtgatgagcggttagccgaattaatggtggggcggcatgtcaacatgaagctaaccaaaccagcacctaacttgggcaagcaaattctagcaatcaaaaacttacaggtaaaaggaaatcacggtgccttaagcgttaaagacctttccctttcaatccgtggaggcgaaattttagggctagccggaattgacggcaatggacaagatgaactggttgaagcaatcactggtttacgccatgttaagtcggggcaaatcttaattgatagtcaaaatttaaccaaccaaaaagttcgcaaaatcaccgaagctggcgtagcgcatattcctgcagaccggcaaaaatatggtttaattcttcacatgtcattagctgacaacttagcgctgcaaacttactaccaacgtcccttctctaatcatggcatcattaatcatcaagcaattttgaagcatgccgtagatttaattaaaaaattcgatattcgaactactagccctgcattgccagctagcgacttatcgggaggtaaccagcaaaaagcaattatcgctagagaattaaatagaaacagcgatctaatcattgcattccagcccactcgcggtttagatgttggtgcaattgagtatattcataagcagcttttagctcaaagagcagcaggaaaagctatcctattaatttcatatgaacttgatgaaattatgcaattatctgaccggattgctgttttgcatgatggtcaaatttcaggcgaagtattacctgaaaaaactacagatcaagaactaggtcttttaatgaccggtgttaagaaagaagatgcaacaattgattaaagttacacctaaagtcaaaaatattctagtaccagttatctcagtaattgctggttttatagttggtgcaattatcatgctgatttggagttataatccttttcaagcatacagctccatgttctctagcgcactgggcaatatgaatggtattggtgaaactattcgtgaagctacgccattaatttttattgctatcggttttgcaattgcctcaaaagctggcttttttaacatcggtttgccaggtcaagcacaagctggttggttgacttctatttggattgtattggccaatcctcaattgcctaagccagtattattgcctttagctattattgcaggcgctatagctggtgctattgtggcaggaattgctggctatttaagagctcaatttggaactaatgaagtaattactactatcatgcttaactatattgtgctctatacttgtcaatatttaatgcaacaagtaatgtcctcaaaattaagaattgataccgatactaccaaaacaattccagccaatggcagcttaaagcttaactggttaactagcatgtttggtgattcgcgaatcaatgctggtattttcttagcaataattggacttattttttattggtatttaatgaaaaaaactaccgttggttttgaaatcaaggcagttggactcaatccttttgctagtcgctatgccgggatgtcttctaaaaagaatattattatttcaatgttactttcaggtgcattttctggcttaggcggtgtagtacaaggacttggtacctaccaaaactacttcactcaaacaactagtttggatattggctgggacgggctttcagttgccttacttggtggtggaactgcaattggtattttattagcttcacttcttttctcaattttaaaaattggtggtttgggcatgcaaactattgccggtattccttatgaaatcgtatctatcgtaattgctgccatcattttcttcatcgctatcaattatgtcattggtttgctttttaaaactaagaagaaccgcagtgattactacattccaaccagaaaagaaaaaggacccaacaatggtgttgatggtccaggtagaaaagtaatcgaaggagaaaaataatgaatttcgttacaatgatggcgttaattgtttcatccactttagtttattctgcgcctctaatcctagcttctcttggtggtgtttacagtgaaaactctgggattgttaatattggcctggagggtatcatgaccatgggagcctttgcggcgattgtcttcaacctaactttcgcttcaacttttggtgcagctgctccttggcttggcactctagtcggcggaattgttggtttgattttttcattgcttcacgctgttgccacaatcaattttcacgctgatcatgtcatttccggaacagtgctgaacatcatggcaccacctttgggtgttttcttgatcaaggcaatttatgataaaggccaaactgaaaatatcaccgctaactttggctacttcagctttcctggtttaagcagcattcccatcgttgggccaatcttcttcaaaaacacctctgcccctgcttggattgccattattcttgctattttgatgtggtggattttatataagactcgctttggcctacgcttacgttcatgtggtgaaaatcctcaagcagctgacacaatgggaatcaatgtctatggcatgcgttatgcaggtgtattaatttccggctttatggcaggtcttggcggtgccgtctttgctcaagcaatatctggtaacttctctgtttctactatcgttggacaaggattcatggctttagctgccgttatatttggtaaatggaatccaatcggtgcaatgctctcatcccttttctttggttttgctcaaagcttaagtattattgggcatcaactgccaggaatcgatcaaattccatccgtttacatgcagattgcaccttacgttattacaatcatcgttttggtcctcttcctcggcaagtcagttgcacctgccgcagatggggttaactacatcaaatcgaaataaggaaaaaaggttgtttcacatgaaacagccttttattttacacatgtccacatagttatccacaagatatagcacttatatgtggtagtcttactatatcttgtactaaataacagctatcggcgttttctcagttggcattggaaaatcactgttaagcaatctaagctcatcatctgtaagtttaatcttttgtgttgcaatattttccttcatgtgttctacactacttgccttaggaatcgttaaaacattgccattgcgcatcgtccaagctagcattatctgatgaggcgtaacgccatgatcacgtgcaacaattttcaaattacgcgtaattcgaattgtgttgcccttgcctgaattaaatggtgaatacccaataaagtttacaccgtgctcttcttgccaagcttgcagatcaaattctgtcccacgttcactgatattgtataagtcttcattagcaaagcattcttctccacctggcactgtaaaaagctcctgcatatcagccgtatcaaagttagatacaccccaataacggatcaagccatctttttgtaatgcttgtaagccgtggatcgtatcagacaagcgatgactgccccgccagtgtaatagataaagatccagatgatctgttccaagacgttttagactggcttctagactctgacgttctagttttggcgttgcatgataggggtagaattttgaaatcaaaaataatttttcgcgatcatatcctttaatcgcttcaccaattagctcttcgctttggccatccccatacatttcggctgtatcaattacactcaggccatgatcaaggccatagcgaatagctgctatttcatcttttttctttttaggatcttcacccaaaccccagctaccaattcctaaacctgttagtttttcaaaattcatcctcgttcacttccttatgttcaaattttaacataattgattcgtaattatttttatcaatcaattgacaaaatggtctattccattttataatggactagaccaacaaatgaggaggacttaattatgaaagttattgttaccgaaaataaaattcaaggtggagcaaaagcatttgaaatttttgaaaaaggaatcaagaacggtgctaaagtcttaggtttggcaaccggctcaacccctgaaacactttaccaaaactgggtaaaaagcgatcttaactgtgaaaatcttaccagcattaacctcgatgaatacgttggtttaaccccagataatcctcaaagctaccactacttcatgcaaaagcatttatttgacaagaagccatttaagaagacttacgttcctgacggtatggcaaaagacgttgatgctttttgtaaagaatatgatcaaattatcaaagacaatcctatcgacattcaactattaggaatcggccgcaatggtcacattgcctttaacgaaccaggcactccattcaacatcggcactcatgaagttaagttaaccgaaaatactatcaaggctaatgctcgcttctttgacagtatcgatgaagtgccaaagagtgctatctgcatgggtactgctaatattatgcaatctaagaagattgttttgatggcttttggtgaaaagaaagctcacgcaatcaagaaaatgattgaaggcaaagtcactgaagaagtacctgcatcaattttgcaaaaacacccagatgtaacggtgatcgtagacgaggctgccgcacaagaattagacgacaaatacaagaactaaaaacaataatttaattatcagcatagaaaaagctaggctttctacaatcgtggaagacctagtttttttatttagcagcctgtatctacaatgaaatatacttcacaaaattgcatttttatataaaaaatgaagcataattcagttttttattgaattatgtttcattcctattcgattttttatttctacccttgacttttagatgtgaaacataatcaaaaaatcacttgtgtgccacaacatatcgtattaaacttaataattgtctacatatggtatttaagaaagaatgtgattcaagttattgttttaagtgggccaattggagccggtaaatccagtttaaccagtattctagctgaacatttagggactcaggcattctatgagggcgttgataacaatcccgtattgcctttatactacaaggacatgaagcgttacacttttttgcttaacacttacctccttaaccaccgtttagcacagatcaatcaagcaattcaagaaaaaaacagtgtctccgatcgttctatctatgaagatgcactgttcttcaagatgaacgccgatagcaaggtcgctgatccaaccgagttcaagatctacgatgacttactcgacaacatgatggaagacactcctggcaatccaagtaagaagcctgacttactgatttacattcatgtctcccttgatactatgcttaaccgaatcaagaagcgcggtcgttcatttgagcaaatcagcactgatccaggtttgaaagattattacgcaagacttttaaagtactacgaaccatggtatgaaaattatcatgcctcaccaaagatagaaatcaatggcgacaaacttgattttgttaccaacatggatgcacaaaaagaagtacttaaagaaattgatgaaaagttgcatgaaatcggcaacttataagaaaaagaaggaacgtgatgacagttattgttttaagcgggccaattggagccggtaaatccagtttaacaggtattttatctaaatatttagggactaagcctttctatgaaagtgttgatgacaatccagttttgccacttttttacgctgaccctaaaaaatatgcattcttattgcaagtatatttcttgaacacacgcttccacagcattaaagacgcgctcactgaagataataacgtcttagatcgttctatctatgaagacgccttattcttccaaatgaacgctgatatcggccgtgctacttctgaagaagtcgatacttactatgagttattgcacaatatgatgggcgagttagaacggatgccaaagaagaatcctgatttgcttgttcatattaatgtttcatatgatacgatgatcaaacgaattcaaaaacgtggtcgtccctatgaacagttaagttatgattcaactttagaggactattacaagcgtctgcttcgttattacaagccttggtatgagaactacgattactcacctaaaatggaaattgacggtgataaattagacttcatggctaatccagatgataaagaaaaagttttggatcaaattacagccaaactaaaagagatgggcaaattacctgaagattgggaaaagcctaccgatattcaaattgaagcataataaaaaccattcatttgcgaaattatcgtatttgaatgattttttgtttacagtgaatttttcgctttattgttgtataatttgaaaaaatgtgtttaaaggaggagtttgaaaatgatgttaaccgtaactggtggacaatggtttttcccacttgtcataatttgtctaattttgggtattgtcgcaaccatcgctcaaaagaaaaagctgactaaactaaaaagaataaccgataactttgcctatgcaatattagttattctcttaatcattgaatggattctatattttcaaaaacaatttaattttattactccagcaatctacacccttgttgtcatctatcttattggacggcaattactaatcagataccgttcttctctattgaaaaaattaggggctaaatataagcaactgacaattggacttgctactatttacattattttagttaccttattgcttttaatcggatctaaattttcaactatgggctggatcattgctggattagttatcgtagcctttggcttcgttagctacatctttgaaaaagacaaacaataatttcccaggaaataataactcgcatagagcttctatgcgatttttatttattcaatttttgctaatgccttcgcaaccccatcatgattgttatcagcagtaatttgttccggagcaaatttttgttttagttctgctggggcattacccattaaaaatggataccccacttcttccaacatatcttcatcgttatagttatcgccaaaagcaatgcaattttgcaagtctacgccatattcttgagcaactattttgactgcactagccttgcttacaccctttaaaacaaattctaataaattctctgctgatctaacaaaagtcaaatcaggatatttagcagttaattcttcttgcatacgatcaagatccgctgaatctcccataattagacctttatgcacgccctgcagtttttcaagttgattaattgtagtcggtgttgcttttacatcgacaattctttcttcatttttaacccgtgggctcttttcttcactacaataccaaacatagccactatagatattccaagctgcatcattatcttgctcatcaacgtagcggcaaatttcagctgcttcttttgcattaaaaaaacggctgattagtactttgcctgtttcatcaagggctaaagcaccgttatacgcgataaacggacaaactttcaaaatttgattaaccactgtcatcatccctttaggaagacgtgctgatgcaggaacgaaaatattaccattaataatttgtctacgaattgcatcccgcgttgcggcggttacctttaaatcatcattaattaatgtgccatcaagatctgaaaaaataagttgtgcggacattctttcacctttatttcttttttaattcttatatcctaggataatgctttatttatgctaatgaaagctgattcaattaaatgcttttcctatcatttaaagataaattgcaataaatgcccaagtaatcattaaaataattcgcgtttacaaatttatttatcaatgctaaagtataagagttgtgttcaataagttaaaacacgaacaatattttggggagataaaatgaattttataaaaagctactttcaattagataagtacaaaaccaacattcgaactgaatttattgctggtttaactacctttatcagcatgtcctatattttgtttgttaaccctagcgtactgggcgccagcggtatgaataccggtgcagtcttcaccgctactgctttagctgccgctcttggtactgcaatcatggggatcgttgccaactacccgatcggtgaggcaccagctttgggaatcaatgccttctttgcttacaccgtatgtattgggatgcatgtttcatgggaaacagccttggcttcagttttcgttgcatcaattattttcatcttaattactttattcaaattaagagaaaagatcattgattcaattccagctgacttgaagttcgctatttcatcaggtatcggtttattcattgccttcttaggtttgcaaaacggcaagttaatcgttgcaaataaatcaactttggttggtttaggttcacttcacgatccacttgtttggattaccatttttggtttgcttgtaactgttatcttgatgatcttaaacgttcctggtgcaatctttatcggtatggttttggcagctatcttcggtatttgtaccggtcaaattgcattgccacacaaggttatctcaactgctccaagtttggctccaacttttggtcaagctatcttccacgttaaagacattaacactgttcaaatgtgggttgttgttttaaccttcctgcttgttactttcttcgatactgcaggtaccttaatcggacttgctcaacaagctggtttcatgaagaacaacaagatgccacgtgtaggtaaggccttagcagctgactcaagtgcgatggctgttggttcaatccttggtacttcacctgttggtgccttcgttgaatcaagtgctggtatcgccgttggtggccgtaccggtttaaccgcagtttttgtagcgatctttttcttaatctcaatgattttcagtccattgcttggtgttttcactagccaagttactgctcctgccttaatcattgttggagtattaatggcacaaaatactgctcatattcattggaacaagttggaaattgcagttcctgcattcttgattattttagggatgcctcttacttactcaatttcagacggtttatcatggggcatgatcacctaccctatctgtatgcttgctgctaagcgtggcaaggaagtcacaccgatgatgtgggtactgtttgtagtattcctgatcttcctgtgggtactgaacttttagatgaaaaagaatagataaagaaaaggactaagttcgaatttgaacttggtcctttttgtgtattcactaacattactttttattcttatcgattataatcgataaaaacgtcaaaatcaccaatcttatcgagtataatcgataagattgcaaaaaaagagtcttttatcgactatacttgatacattccctgtcaagtagacagtagaattacataaagcttttattcctcagttgattaataatcagctgaggattttttggcttctcttattttcttttcgtgtattttttgccagtatttctcaattcgatgatttggtgcaatagggcaattcttaatattgcctttcatcgcttctttgcgcatttcaccagcagttaaaccgttaaaacgtttctgtggatcttcattaatgtagtaatctattgtcttacaaatagaatcattaagttcatcataactggccacttgaggatgaagaataactcgcatttctttgataatgccttgccagccttccattggaccattatcaatacagcagccaacacgagacattgattgcgtcatgccttggtcttctaattggttttggaaaggtgcgcgagtaaattgaaaaccacgatcactatggaaaagcggatgagcattagggtatgctttaacagcctgcttataggctgcttgaactaaagcagtatcgtttcgtttactaattgcgtagccaacaggatagcgatcatatagatcaaacacagtacatagatatgccttaggcaggttagcagcaacgacttcagtgatatctgtacaccatttttcattaggtctagatgcattaaagtctctttttaacttgttttcggccgttttctcaggcgttgtatgcttgaactttagcttctggtatctaggcttttgtgatctaatgccattgatacacatcaagcggtaaacagttttatgataaaccggcttttcatcagacatctgtcgattaactgccatggtcatcttttccgtcccaaacagactgttgttagacttagttatttcaatgatctttgcttcaatctttttgtctcgttcttcacgcttactcggcttgcgcttaggatcaaagtatttgtaataagctgagcgtgctattttagcccatttgcacattaaatcaatcttccaattgtacttttgatggcagtcatggattaactgatatgtttcttgtttccagcgtctttttattgcggcttgtctgtatcttggttgtccggcaagcacatcctttctaactgatctaatttttttaggaattcgttcttagtttgttcttctttgagctgacgctctaattccttaatttttcgattagccagttctaactcagttagctcttctggcttcttatgtctgcctcgtttatctgttaatcctgtttcaccattagctagatatttgtgtgtccagctgtaaacctgctggtaagaacaatcaaatttgacagctgtttgagtgtaattcttgtcgtgattaagacagtattgaacaatctgaattctttcttgctgggtagtttttcttcttgctttagtcatatagacctccggatggggatcatagtcccgattttctatatgactattatacttggaaacccattctgatactgttccattgcttctaatgccatatttattagctaaagaaggtaacgacattttgccagctaaatattcttgaacaaccttttctttaaatgccttagagtaatgattattgtattgagcattacttagaagggtatcacgattgctttgatattgatgaacccatcttcttacttgcatcgctccacttttacttggcatcttaagccgtttagctatttcaacgctgctcctattaccattcaagtattgttcaactgcccatatcttttgatcgaatgaatatttactttttctggacataaaaaatcccacctccatggataattgaatactttatgtatttaaatcgtccactttagtgggattgtatcaactcgataaaggctcttttttatattacccaggaaatattaacgtacagtttctaaacaatatgattttttataataaaatgcgtcataacaggcgaattttaattggctttaaaatttcttttttctaaaaacaagatagcctaaaagggtaaaaagaactatatagcacaatgtaccaattaataattgtggattagagagatgggaggttaagtgataagttgcataattataatactgtgtcgttaaattgagcatattcaaaggattccaacgaataatatcaaccggtccaatattataatttaataaattagatgatagactgcttcccataaagataataattgcatttatcataataactacggtgtttgaattaatcatacaagacattaagcaaataaggctgattattaacgtagaggttataatatcaacgcctgttgttgaaagcatatttataaataatgactgattatacttataagtcgcagtccaaggaactatttttgctataagtggaacagtgttaaagaagatagttacaatcatagctatggcatgtagaaaaagattataaataaaaattgtaatgaactttgcaagatatactgttcctttattttgagcatgatatagtaatgtcaaaatcgttttgttttggaactccattgagaaaatagttgaacctactatgaccaaaatcaacataattatttggctagagttataacaagtcataactaacaaattgccatattgttttcccatggccaatcccataaaaatcataaaaagaatcataaaactgataatccaccaaggcagcttacggtgacctaacttatagaattcttgttttaattccgcacgcataaaagatcacctccgcctaaatagaccgctttttaaacagtaaagcgccaatccaaaagaaaactacagcgtacactaaattagcaataattaattctgaattagtcaaatgtgttacagtaaccatctcattattcgatagttgcgtaatgatattaatcatatttaatggattccaggctaaaattgatttcaaaccaggaaaagccgacattgctaaatttgaaagatctgaaccaagaaatccgattgctagtccgattatgatcactgttgcattattcctaatcaacaaaataagcattaaagagagggcaacgataaatattaaataaatcatcgttcctcccatatttaggaatagcgcattgattaagggatgtccatgataatcatcatgccaagaaaatttcgaaccaaccatcaaggtcttgagaataaacgaaaagattatcccaaataccagtaagatgaaactataaaaaactaaaacaatgaacttagctgtataaagaatggacttatgtgatgttttgtagagtaaggttgccatagtattatttcgccactccattgcgatcatatcagaactaatagcaataatgatgataatagcccattgtcctgcaccgaatccttgagataagagtgagggcgtcattttataacttgtaccaactgtatacaacattagtactaataaaacgagaatcccatacaatggaatcttgcgatgagcaaatttatagaattcgtgtgagagattaattttcattattatctcccccttgttcttgccgtaagatgttgacaatcttctgttctaaagttaagccagttggagccaaatattctatccagatttcattatcaaacagtagcttttgaattttatctatatctttatgatcaactattacagcatcatcttgtctatcaaaaggaattttagcttgttgtagcaaattggtagtttgctttatatcagttgtttttaatttagattttggatttttttcttgagtgaatttgctcataggtgaatttataataattctaccgtgattaataatgattaccgatgtcattactttttgtaattcacttaagacgtgactggaaattaagaaggctgtaccacgtgcagcgtattcatgtatcagttttcgaattaagattgtagcttcaatatccaaaccattcataggttcgtcgagaataaccagttgcggattatttaacaaagccaaagctattcctagtttttgcttcattccaactgagtagtcttttgcctttcgatcaatataatctttcatccctaatcgattaatcagtttatccataccacttaagtctttagcatagagctttaaattatcatatccagacagaaaaggataaataacaggcttttcaattaaagcaccaacagattgtagtgctaaatgatctttaagagtaatttcgtgatcattaaaactaattgaaccagtgaatttagttaatcctagcaaagttttcataatggtggttttgcctgctccgttatgaccaataagtcctacaatttcaccaggtgaaattgtaaaagatgcatctctaataatctctttgtgaccataaaaaatatttatattgttaacttttagcatgctatcctatctcctttaactccggattagacagagagttaaatcacttttctaattaaagtacctatattaaagtctagtatcctttcctgaattgtcaaattaagtgcaacagtgtaagtgtcaatgtttttgcggtagcctttaaaccattagtctaaccttaatttcttaaatatttatatgacttaaatttctgcttagcttgcttaaataactattgccagctacctgtgcggttaatgcgccatgctggatgcctaaatgaacttcatgacgcttctttaagctgtcacgggccgctgcttttaattcctgttcagtcaatacagttatttctgaatcttcaaactcgctgctaagccaaaattccagctctcgattcttgatgcagcttaagatcctaagcatgccttctgctccagattttgaccatttcttgccttgccccttaacacggtaggtatacttgcggtggttgctctcgcagcagccaatggctttagtcacagtcagttttcgtttcttaaacggcttaatatcgtcccaatgacgatcaatataattccttaggcgccccagataatcatgattgagctcggtattcaattcatcaattagtcggctttctgcagtggttaggatagttttaactttgtcatagctgtatttgtattccaaagcagaaatcagcttgccttgcaggtcaggcgcaaaatatagcctttctttgattttcttatttaggtgaaagacatccaagaaatgctcatgacgcttgcatagccctacaatgtcatcgaagtctgttttggcatatccagcaccgccatcggcgttgctaagaattacagtatcagaaagatcataagtattggccaggtactccttggcttcgttcagcgcatcaagtcggcttaaagaaacaaattccttggcattgattcgctttctgcgtttcttgcttatattgacaatgccttcacagacctgatagcgatgaaattccaaccggcttttagtgcctttgatcaccacgccatcgccttcaagatacaaaactgggacctttttcttagtgcctgcggcatcatatcttgaatctgcttcttggccagctttaatatttttcccggccatttttaccaaattgcccacctgcatatggctaatattaaagccagacaggcaattgactgctagagcagtattgcgataagtggcaacgctgcttacttctaagatgtttttgactgctaaaatactgtagcgcttgtatttgtaaaagcccattaattcatccaagggataccttgcttgtttgcctgggcagacatatcttcttctgacatacctaacttcgccaaaagccatattgattgagcgctcattcttcttatcaatctgatagccctgtgctttaaccttggtaatcatttcatcatcaactttagctaaagccaaggccatgatttccttaatcaggtttaagaagaaacagattatttttctttcacgcttaatataattatcttcagactttataatatttgcgatttcagttacaattgaattcataaaagaccagcttctaatgtgttttttgttcttaacatcagactactggtctttttgtttgagctcaagtccaaattcaaaggacttgggcttttttaattatttattcaacttaccgtaaaaaattatacacttaggcaacagttaggctatgaagaaatatattgcttgaagagttcttctgctgtctgatattggaggattcggcgatatttgtggttaatggcattggttgcctgttgaacataagcttttgacttgtctttcatgctcttgcccttagggaagaattgacgcaaaagaccattgcagttctcatttgtgcctctttcccaaggagaatatggatgagcaaagtagatctgacatcctttgattttggtcatatccgcaaactcagaaccattgtcaaacgtaattgatttaaaccaattaggatgtctgtcaatctccttttgaagcagtctttgacaagtactggcccgatagtcaggaattttgataacaacctcaaaacgagtggttctttcagtcagtgtcattaaggcaggttgatttttacgtctgacgcctttaaccaaatcgccttcccagtgcagggaaacttttctgttttcaacttctttaggccgctgttcaatcgaattgccaagattctttttatgcggagcatggccaccatgactatgatggcgtttgtttctgcgtcttttaagcttcattggcaggtcgatattgcttatatccagcaatccttgatcaatataacgatagacagtgggcgtgctaggacatggataatttggcataatcctgtgaaattcaccaacgaattcatcaatgctagtggcatcaaatttggctttaaagcgtctgcttagcattctgaaaaagacggcatagtgttgcagtggattacgcttatagcagtttctgcggcgcttttcatgataaatttgtgcagtaatagtgctcatacaagacatagctgctgtctctttgcaggacactgcctcgtctaatttcacggctgatagttgatttatgacagcctacttcttgagcgatagcattgcaggaggttatgccagaatcaagcagagcttgaatttgtccacgttgttcgctgttcaattgatgataatgcttggaaatgctagaatttgagttggtcatgaagatcttcctttcttgatttttggtcacttcaagtttaggtcttcatggcctttttgtttaacacttagtgttgcacttcaattttaaatccgggtctagtatccttttaataaatattttttactatgttcacatatgaacaataaatttaagattatctctaataaaaccgattttaggatttttttgaataaatttgctttatttgtttaaatgcagtttcaaaaccatcttttagagtattcaagccctgcagttctaaagcggcccacatcaaccgtaaattgcgatcatcatttgtttccaaaaaatttaacataaaatgcatgtatttgtatcttattttttcaaaagcaaacctgtctgtaatatctaagccagaaattattgcatctaatctttttgccttctttagatcttttttaataagaatacgcgtggtgctagttaaatcgttttagttaataaaaaagtccaatcttgttagactcaacttgtataataatagaaaagagcctgatctgattgaactgccttaagcttaagcgttttagccaccatttacaagttagttttaaagatttagtgataatttgtcggcactggtatcgtttgtatgcaccggctgagtttactcatcggcgaaatattgatcaaattaaaactacggacagtctgattttggctttacttatctggcaagctaagacaggaattgaatcacaaagaagattctgtgaatgtttcaattgtttatcacactcacgttttaatcggcgttcacgtcagctattgcaattgatttatcagatacggcaagaaatgaataaaaaggttgacctgaatggacatttcttgatcattgacagctttccggtacctgtttgccaaccaattcgcaactatcgtgctaaaatttttcgcggttatgccaacattggttataaggccaccaagaaaatttacttctatggtttcaaagttcatgccattgttagcgatgacggttacattcttgattatgtcgtaacaaaagcatcagttcatgatgccaaggagacagttgaactgctggaaaatgcccatccatctaattactatcttcttggcgacgaaggctatttaggcaaagaactgcatcaacagctaaaacaaatgggttatgaactttggacaccatatcgtaaaaatatgacaggagctaaaaagcacaatgatcatcaattgatggctattcgcagaacaattgaaagcgacttttcgcttctgacctattacaatgccgagaacaatcgagcacgtagtctgataggctttcaaagccggttggaaattgtaattttagcttataatttggcttattgtctagaacgatttaactagcaccacgcgtataagaatatattctgcattaatcaaagtatttaaaatagctgtagaaaatttcgaaactgtcaaatcttttgtgtaaatagatctttctcgtaaattgattttttaattatttatttaatcaaagtaggattctaaggtgtcctgaacctgaccaaagcctttatgaattcgattgaaataacggtcattgtagctcattgcctgaatgccaataaaagcatcaagcgactgttcagttggaaactctgccttaggcttagctttgcgcttgatcacattgttaaatgattcaatcatgttagtcgaataaattgaagctctgatctgcttgggatagttataaaagaccagcagatctggttctatgtctttcaagcttctgataacatggctgtaaaccttgccccatttggtatagaagtcatgcaggacagctgtggcttcttctttgtttgtctgttgatgcacctgtttgaattcgttcatgatcttttcacgatcgtcgacgcgtactttagcgcagatattgcgcatgacatgaaccaaacagcgttgaaaatgagctttaggataagtcctggccaaggctgttttcatgccaacaacaccatcagaaagaaaaagctcaacttgctttaagcctcgggatttcatgttttgaagcatatctgtccagacttcaatgttctcgctaggcgcaatgcagtagtcaatgacctccttgtgcccattaggcttgatgccaatggcaatatagactgcttcacgctcaaatgtttctcggcgcaaaggaaggtatgtcgcatccaaatagacgcagaaaaacttgtcgcttagcttgcgtttgtggtaagcctcaacctttggaatcatctgcttggaaatatttgatacctgagctggactgtaatggctgccatacatcttttcaattagatcggctatttccctggtggtcacgcccttggagtaaagcttgataatcatgctttccaagatatccgagtgctgcttgtagtcaggcagcgtgtgctgatgaaattgaccgttgcgatcccgaggcacttgcacttcaattgggccaaattgcgtatcaactttgcggaaataagcaccatttctagagttgccagtattccagccatttctggcatagggatcatagcccagaaaggcagtcaattcagcttctaacaagttattaacagcctgttgtagctctttgcgcaataaatcatttattttgtctggattgaatagagcttgagcaaaatctttggtaaaatcattcatgaaggagttcttctttctgtatgtgtttttttgttcaaaccaatcatacgagaaaggaactcctttttctaatgtttaaagaaataaatttaaggaatcattcatccttacacaaactattttacagtctcaaaatttcatttccaaatcgttattatttttaaaatagaaaactagtgaaaaagataaactataaatagttcttgggctaataagattctgagtattaccaaagaagtacacatcatcgtaataccaaacttcatctccagataaaatttttgaaaagtacatcgataatctctttttatagttatctgtaaaaatatccactcctgtaagatcgtaataagcattacaataaatggctgcttttaaaaaagttcgtttatcgaaactgtcattttcaacttctgataacaattttttagattgcgtttttaagtaattaatatcattactttcatatgcttttgaaacttctaaagttatattttttagataattcgaaatattattattaaagaaatctattttttggacatgaattacttcgagtagtttgaatactttttcaatatctaaacctgcttcgcctctttcccatctttctaattttgaacgagaaatacctactgcttccgcagctttactacttgaaattttggttgcctttcttaattttctaaattttctaccatatgtttctttcataacccactcctagttacgttcacaaataccttcaaaataatgatccagataaaggactagttttacctccttaatgatgccttaatgcaataaaaaatcaaactcataaatattacctaaattttcatttagcgctactaaaaaagcctaataccatcatcaagggtattaggtctttattacctaggaaatactaacgtacagtttccaaacaatatgattttttatgacagtttgggcaacgcaattttctagtatgtggcgtgtgtgccgcaaacataaagcttttaagttctggaacaaatttgtaatcgcaattaggacaaatatatgccactttttgataataatttttaagtaacacgaatgacattgcaatcaagcttactactaaaatagctaccgaaatataggctgcagtgttcatcttattgatgatacagtacgcaataaatgccataccgaccaattcaacagtgatttctactgctgacaatttccacattgaacgtgttacctctttgtatctagtttcattattcatgattttcgtaatgtcagtaacttccgcaatattattgggtttacttagaaccttttgtagttggataattttcttgttttgctcttctaatttttgcgtttctgctttatttctttttagttgatcttcaagcaaaagatcgattaatttatcaccatttttatcttctagtattttttgaatatcctttaacgaaaagccaagctcctttaaaaagatgattaattttaattgttttacctgctcatcagaatataaacgatagccactttcactaactcgactgggtttgaccaaacctttttgatcatagtaacgaatggttctagtggttatgtttaacttctttgctagatctccgattgtgtattctgacattactttctcacctcaaaacttaaatatacgggtttacgctacgtcagagtcaagaataagctaaattttccgtaaaaaacttcaaaaagcaaatattttgctcttttcctattgaaattattaacattaactgtataattttaagtgaatgttcactttatacaaatttcggaggactaaatgaacgcaatcagtaatttctttcatttaaaggagaacaatacctcctttaagaccgagcttttagccggtttgactacttttgtaagtatgtcatacattctgttcgttaacccaaacgtcctaggtgccagcggtatggataaaggtgctctattcaccgttactgcattgtcggctgcctttacctgtatcgtaatggggcttatcgctaactacccaattgcttccgcaccaactttgggcttaaacgccttctttacctatactgtttgtttaggcatgaaggttaagtggcaaactgctttagcagctgttttcgttgcatcaattctgttcattttgttaactgtctttaaggtacgtgaaatgatcattgatgccatccctgccgatattaaatatgctatttccgcaggtatcggcttattcatcgcctttatcggtttgcaaggtggtaagttgattcaaaacagtgattctaccttagttactattggtagtctcaacaaccctactgtttggatcactatctttggtttaatcattactattttcttaatgattgccagagttccaggtgccatcttcatcggaatgatcgccgctgctgtttttggcatagtgactggtcaaattcccatgcctaaaggcgttatctcttcagttccaagcattgctccaacttttggtcaagcagtcttccatattggcgatattaataccgttcaaatgtggatcgttgtctttacattcttacttgttactttctttgataccactggtaccttaattggtttggttcaacaagcaggtctgatgaaggacaacaagatgccacgtgctggtgaagctctagcagctgattccagtggtatgttggtcggttctgttcttggtacctcacctgtcggtgcctttgttgaatcaagtgccgggatcgctgttggtgggcgtaccggtttaactgccgtttgggttggtattttcttccttatttcaactatcttcagtccaattttgagtgttttcactacccaagttacggcaccagctttaattattgttggagtattaatggccgaaaacttggcacacgttcactggactaatcttgaaattgccatcccatgtttcttaatcgcattgggaatgcctcttacatactctatttcagacggacttggctggggtttgattgtctaccctgtatcaatgatcgcagccaagcgtttcaaagaaatcacgccaatgatgtggattttgtttattgttttcgtaatctacttcgttgttttaaatgtaaaataattctatcttataacccccttatcttacttttacattaatatataccctcacgcgtggtgctagttaaatcgttctagacaataagccaaattataagctaaaattgcaatttccaaccggctttgaaagcctatcagactacgtgctcgattgttctcggcattgtaataggtcagaagcgaaaagtcgctttcaattgttctgcgaatagccatcaattgatgatcattgtgctttttagctcctgtcatatttttacgatatggtgtccaaagttcgtaacccatttgttttagctgttgatgcagttctttgcctaaatagccttcgtcgccaagaagatagtaattagatggatgggtattttctatcagttcaactgtctccctggcatcatgaactgatgcctttgttacgacataatcaagaatgtaaccgtcatcgctaacaatggcatgaactttgaaaccatagaagtaaattttcttggtggccttataaccaatgttggcataaccgcgaaaaattttagcacgatagtttcgaattggttggcaaacaggtaccggaaagctgtcaatgatcaagaactgtccattcaggtcaacctttttattcatttcttgccgtatctgataaatcaattgcaatagctgacgtgaacgccgattaaaacgtgagtgtgataaacaattgaaacattcacagaatcttctttgtgattcaattcctgtcttagcttgccagataagtaaagccaaaatcagactgtccgtagttttaatttgatcaatatttcgccgatgagtaaactcagccggtgcatacaaacgataccagtgccgacaaattatcactaaatctttaaaactaacttgtaaatggtggctaaaacgcttaagcttaaggcagttcaatcagatcaggctcttttctattattactattacaagttgagtctaacaagattggacttttttattaactaaaacgatttaactagcaccacgcgtataccctcatctaaccaagtagcatgtctacttggtttttatgctaaaaagatgtctgttaatagtatggatgatgacagcagattctattagatgatataataatcaaagaaaggctgtgactaaaatgaaatcatataaaaaaattcaagctaatgttgactcctcactagcacttcaagcagaaggaatttttcaagatatagggctcaataccactaccgcaataaatgtgttcttaaagaaagttgtggcaactggtggtatcccatttgaattaaaagaaactcctgaacaaaaagcctcaagagaattaattcaaagcatctcaaaaattccccacaaagaagctaaaaccaaaaaggaaattgaggattggctagatgaggactaatgatattgtagatatttatgttgcttacattgataagcctggaggaaaaaataggcctgtattaataattaaattactaaacagtaaagcttggctgctaaaaatcacttcaaaatataaagaaaaaagtgaaaatatccgaaagcattactttcccatttttgactggaaaaaatataatttagataaaccatcatacattgatactaaaaattatttaatagttactattagtgatttaaatatcgaaaaataccgaggccatttctcaatagcagatttacgcaaattaaaagattttattgacgaaaattcaaactaagaattaaactatatgttttagttcctaaacacaatctcaaatatgagattgtgtttttatttatccaaatggcatcttttgataatcatttgacgccttatgatgttcggattcttctaaattgccgctatactattttcaacaaatcgagttatgaaagatttatttaggaggaattcattatgacaactcaagaaggaaaaactgctttaattactggttcatacggtgggcttggtacccaattcgttaacattcatgcttcacacgggggtgacctaatcctagttggtcgcaatgctaagaaattagccgatcaacaaaaagaagcccgtagaaagtacaacgtaacggcgcatattatcgatgttgatctctcacaaccagatgctgcgcaaaagatctatgatacttgcaaaaagaacggttggactattgactacttaatcaacaatgctggctttggtggtcaaggcgaattcattaaaagaagtatggaacaagacatgtccatgatcgccgttaacattgaaacgcctactcgtttaactaaattatttttacctgacttcgtaaaacgcggccgttatgcctggcccacttcaagccgtttactacgctactaaagcatacgttacaagctggtcaaatgcgttatggcgtgaagtacaaggcacaggcgttacggtaagctgcttaatgcctagcgctatgcaaaccggttttatcagtcgtggtgatttgagttcaactcaattattcgcccatgcggttagtccataaggtgttgcaaaagctgggtatgaagaaatgattgaaggcaagcttaacattaccgctggtttaactgcagcccaaaaaccattcatgaaattggaaccaatgttacctaagaagatgctcatgaacaatgtttataagatgcaagaacaaggtagtagaaagtaatcaacttatcttataatatggatcaaaaggatggtatttgaatgaatcactttattttagatggtcgctatgaagacctactctcttttaacgttgaagaagcacttaaaaaagccaatattcctgaagattgtttcaaaaaccccatccttcaatgagtgaacaacaatactacaattttatggcggctattggtgatcagattagtgatccattcactccaattgaaattgcaactacaaatccaattgaatctttctctccaccaatttttgcggcatatagtagccgtaacggagatatttttatcaagcgtctagccaaatataaaaagctgattggcccattatcttttaaaattgatgaggatagcaagcagctctctattaccctaactccaagtaatcagcaatattccctaccctcttttctagttttatcagaatttgcatttttagtgggacttttgcgcaagacgaccaaagaagctatttccccgctgaagatcacaatgacatcccccgtcaatgatgagcaggtcattaacttctttggctgcaaaatcgaatcgggtaaacgcaacaccatcacttttgccaaaaaagacttgcaggtcaattttattagttataactaagcaatgtgggattatttcaagcctgaattaactaaacgcttatctgaattatccgttgatgattcaactagtgctagagtacgtagcatattgaccgaattacttcctaatggtgaatttacaattgacgatgtagctaaaaagttaggttattctaaacagactttacagagaaagttgagtagcgaaaacactacttttcaaaaacaactgaactccacccgagaagttttagcgctaaattatttacaaaacaccgatatgacaactagcgatattgcttaccttctaggctatcaggaatttaattcgttcttacgtgccttcagcatctggaaaggcataagcattagcgaatatcgtgaaaaaatgaataaataataaaaagcagatatattttctgtttttttactttataaaggaaataatatgagatttttgctataatttactttataaaggaaataatatgaaaattgctaaaaatttactttatgaaggaaataatatgcagttaaatttaattaaccgcccacagtatttaaatcaattacttcaatttcaaaatacagaattcatcaaagtactgacgggagtacgaagatcaggcaaatcttatattttaatgctttatcgtgaatatttactcaaacacaacataaatgaacatcaaatcatttatatttcttttgaagactttgataatatagatctttatgaacctaaaaagctttattcatacttaaaagaacgaattattagtgaccaaagaatgtacattctacttgatgaaatccaatatgtatcagattggcaaaaagtagtaaatagccttcgacttaatcctctacttgatatcacaattactggcagtaattccaatctattaagtggagaattagcaaccttactatcaggaagatatgtagaaatacatgtttatcctctttcttttaaagaaatgctagattttaaacatatttctgaaccatcagagcgtcagattgataacttatatgatgaatacattaaatatggtggtttccccgcggtagtgttagcaaaagaagaattaaaacaaactattctttctggaatttacaataccattattgtcaatgatatcggctacaaaaatggattaagagaaccagaattagttgcattagtagctaaatatctagcagattcgattggtcaattaattaatccgaacaagattgtaaatacactaaaatcagcaaattttgatatctcttataacgctgtgcagcgttaccttaaatattttgaagaagcatatcttttttataaatctagtcgttatgatattagagggagaaagattctttctactcaaggtaagtattacattgtagatactggtttgcgtacccaagctttaggagaaagaaataatgaccgcggtagtgttttagaaaatatagtttatgtcgaattacttcgccggggctacacagttcaaattggtaaattagataataaagaaattgatttcatcgttttcaaggtaaatgataaacaatatattcaagtaacctaccagcttccagaaaattctactagagaaactgataatttacttcaaattccaaataactacaaaaaaatagtcatcactggccgatatgaaaatgaagaaatgatttccggtattccaataatcaatattaaagattggttattaagctctaaaaactgatcaaaataggatcgactaactcatgtcgatcctatttttaaattaaattatgttttttacaataagtaaaaattccgtcatcttgcacgctgccacagatgtcatcagcaatttccttcacatcgtctgttgcgttccccattgcaacgccgtgaccaacagtctttaacatttcaatatcgttgccgccatcaccaaaggctattgcttcgctcacagggatttgataataatctaacactttttcaattgctacacccttactaccagtagctggaataatatctgctgctctatcccaccaagctgttaccttagcattttgcgtattagctacaagtccgtcataatctttttcacgacagcctaccattatttgataaaccgtatcctgatcgacaaccacatcaaaatctggcgccactctcaaatccgttccaccaatagcaaagtattcctttaaatcctcatcaacaccattagctgcaatccgtgttttggtagctacagctaacggccgatttattttctgagcattttgaatcatatgcaagacatctccttgccttaacggattatcaaaaacaatgtcttgatcgttatagcagtaagaaccattaaaagttaaatatgcatcaaaatctacacccaacttaggcagttgcactggtggtctgcctgatgcaatacaaatcataatgccgttgtcttgtaaagcatgcagtgtctctagcattttaggtgtaattgattttttcttttcaattaaagtaccatctatatcaaaaaatattatcttaggtttgctcattatttttaccttctaaagaattttctactaattattatactttaaccgatatttcccaggaaatattaaaattgagctctcttcctcaacatctgtgctaaactagatacaattagtttctttaaaagttaatagttacggaggaatttttaaatgcagacattggaaaaagtctttcatttacaagatgctcataccactgttaaacgtgagttaatcgctgctttaaccacttttgtcagtctctcctacatcttattcgttaacccaaacattttgcacgcagctggtatccctaaaggtgccgcttttactgtaacagctcttgccacagcagttgggtgttttttaatgggttttattgctaattatccgattgccttagctccaaccttaggtagcggtgcctttttcgcttataacgtatgtgttgggatgcatatttcttgggaaacagctttggctgcagtccttgttgcttcagttttattcattttaattactgtctttaaattacgcgaattagtggttaatgccattccacaagatatgaagtatgctatttcagcaggaattgggttattcatcgcttttattggcttaaaaaatggtcaattaattgttaacagcgattcaactttagttactctgggaaaatttagtactccagcagtttggatcacattatttggcttaattttgactgttgtattaatggcattaaacgtgcctggttctatctttattggaatgattgttactgccatcttcggtatgatcattggtcaaattccattaccacataacatcgtttctggtgccccaagtattgcaccaaccttcggccaagcggtttttcacattaaagatattaatacagctcaactttggatggttgtactaactttcttattagttaccttctttgatactgctggtactttaattggaatgactgaacaagccggtatggttgacaaggatggcaagattccacggatcggtcgtgcttttttggctgattcaactgctatggttgaaggtgcagtctttggtactgctccacttggaacttctgttgaatcaagtgccggaattgccatgggtggtcgtactggtttgactgctatctttgttggtattttcttcattatcagtatgattttcagcccattgttacaagtaattccaactactgtaacggctcctgctttaattatcgttggtgtactgatggccagcaacttaaagaaaatcgattgggaaaagttcgaaattgcctttcctgcttttcttaccgttgtagggatgccactgacttactcaatttcagatggtttggcattaggcttgattgcctacccaattaccatgattgcttctaagcgttataaggaagttagtcctatgatgtatatcctgttcgtagtatttatcatctttttcttagttacgaatttataaaaagaatgctaaagataagcagtttgaagctgcttattttttattgacttgatttttattttgtactactgtaataaatatataagacagtttttatgggagaagaaaaatgagactgtaaaatagtttgtgtaaggatgaatgattccttaaatttatttctttaaacattagaaaaaggagtacgcgtggtgctagttaaatcgttctagacaataagccaaattataagctaaaattgcaatttccaaccggctttgaaagcctatcagactacgtgctcgattgttctcggcattgtaataggtcagaagcgaaaagtcgctttcaattgttctgcgaatagccatcaattgatgatcattgtgctttttagctcctgtcatatttttacgatatggtgtccaaagttcgtaacccatttgttttagctgttgatgcagttctttgcctaaatagccttcgtcgccaagaagatagtaattagatggatgggtattttctatcagttcaactgtctccctggcatcatgaactgatgcctttgttacgacataatcaagaatgtaaccgtcatcgctaacaatggcatgaactttgaaaccatagaagtaaattttcttggtggccttataaccaatgttggcataaccgcgaaaaattttagcacgatagtttcgaattggttggcaaacaggtaccggaaagctgtcaatgatcaagaactgtccattcaggtcaacctttttattcatttcttgccgtatctgataaatcaattgcaatagctgacgtgaacgccgattaaaacgtgagtgtgataaacaattgaaacattcacagaatcttctttgtgattcaattcctgtcttagcttgccagataagtaaagccaaaatcagactgtccgtagttttaatttgatcaatatttcgccgatgagtaaactcagccggtgcatacaaacgataccagtgccgacaaattatcactaaatctttaaaactaacttgtaaatggtggctaaaacgcttaagcttaaggcagttcaatcagatcagactcttttctattattactatttacaagtcgagtctaacaagattggacttttttattaactaaaacgatttaactagcaccacgcgtaaaggagttcctttctcgtatgattggtttgaacaaaaaacacatacagaaagaagaactccttcatgaatgattttaccaaaaatatggctcaagcactattcgatcaagacaaagttaatgattttttgcgcaaggaaattcaaactgcagttaatcaattgcttaaagttgaattgactgcctttctgggctatgatccctatgccagaaatggctggaatactggcaactctagaaatggtgcttatttccgcaaagttgatacgcaatttggcccaattgaagtgcaagtgcctcgggatcgcaacggtcaatttcatcagcacacgctgcctgactacaagcagcactcggatatcttggaaagcatgattatcaagctttactccaagggcgtgaccaccagggaaatagccgatctaattgaaaagatgtatggcagccattacagtccagctcaggtatcaaatatttccaagcagatgattccaaaggttgaggcttaccacaaacgcaagctaagcgacaagtttttctgcgtctatttggatgcgacataccttcctttgcgccgagaaacatttgagcgtgaagcagtctatattgccattggcatcaagcctaatgggcacaaggaggtcattgactactgcattgcgcctagcgagaacattgaagtctggacagatatgcttcaaaacatgaaatcccgaggcttaaagcaagttgagctttttctttctgatggtgttgttggcatgaaaacagccttggccaggacttatcctaaagctcattttcaacgctgtttggttcatgtcatgcgcaatatctgcgctaaagtacgcgtcgacgatcgtgaaaagatcatgaacgaattcaaacaggtgcatcaacagacaaacaaagaagaagccacagctgtcctgcatgacttctataccaaatggggcaaggtttacagccatgttatcagaagcttgaaagacatagaaccagatctgctggtcttttataactatcccaagcagatcagagcttcaatttattcgactaacatgattgaatcatttaacaatgtgatcaagcgcaaagctaagcttaaggcagagtttccaactgaacagtcgcttgatacttttattggcattcaagcaatgagctacaacgaacgctatttcaatcgaatccacaaaggctttggtcaggttcaggataccttagaatcctactttgattaaataaaagattaaaaaatcaatttacgagaaagaactatttacacaaaagatttgacagtttcagaaaaatgaaaatcaaaaaagtactactgaccacgtctttactcacgattagtttgattactctatcgggatgtagtttccacctgtttaccaacaagaattccggtcctacaatcaaacgaactttgtcctctaagaaattcaattcacttaaggtagccagtgacattactgatgttgaattacatgcaagtaatcaatacaaagttatctatcatgggctcaagcgtttcaaacctagcgttaatgtgaaaaatggtcagttaaagatcactcaaactagtaatggtgtttcttataacatcaaagaaggcaatacagtggcaatctacctacctgccaaagaattacaaaatatcaatattaatctttctgatggcgatatcgatgctgatggcaaggttcaagcaaaaaatgtcaaacttcacagtgacgatggtgatgtcaactttgacgatttaagaattagctctggcaaaattacctcagatgacggcgatatttcagtttctaatctacttactagaaaaggcgccacagttgaatcagatgatggtgacattcgtattagaaagagcaatgccagtggttaccgcctaacttctgacgacggtgacgtcacattcaagggagatacttctgataatgatgacggtggttcttactacaaaaatactaagagttctaacctgctctctgctcacagtgatgacggcgacgtcaacgttaactaaatttcgtcataaggcgataagtttcacatgaaacaaaaaatcaatgcatcattgataatgcattgattttttacttttttcctcattcatagcataaacacgactttacaagattatttaagtttctattgaaatagacataattttaatacgaaaaagataagactaaattctacttttccattaaaaaatatttaccaattttccattttctaagtcaaaatgatgcgtaaatttcttcatcgtcgttggtgaaatatggtggtcaatttcaattactgttaatggcgaattcaaaaagacattatgaatttgctcagcagtttgcggatcaagtgaagcagttccttcatcaactactaaaatttctctttggaatagaaaggcacgcgctaattcaattctttttctttccccacctgaaagattatgcccatttttttcaattacggtatctaagccatgtttttgaacgtaattagttaatcatgcttgttgaaccgcagccatgatttgtttttgatcaaattgtttaccaagagttaaattaaatcgtaaagtctcattgaaaatttgcgaagtttgttgaacttcactaaaaatttgcgtttcaacagactgattattaaccaaaactcttcccttctgcggagataatttacccattaacaccttaagcaaagtagatttaccttcaccggactttccagtcaacagaattttatcccctctattaacgcataaactcacatcattaagcactggactatcagcttgatagccaaaagttacattgtccacatctaattgctcaaatttgattggagcctcatcttgcttagttgttaaaggtttgaaagacaacaacttagcggtcattggtttagtggcggcaatctgattacgaatactattaatactaaagaaactatttacaatccaagcactagagtattgcacggccacaaaagaagccaaagcaacgtgtccttgaattaccataataattccgactccaatcggtaagaagtctagtgagtaagctaataaattaacgtaaaaatcactcttagcaattgtatcgtcacgttcacgtttattctcaacagaatttttgattactttactactcttttttacaaatagagataatacattgtaatttaaaaccgtattgatatttttgagtaaatccgacataaatgttacataactacctgttgatttactccaatcggatgactgcttggctgttttcttgctaaacaaactaggaataaagcttgaaagacttgcaaaagcaacgaagactaatgtcaagactacactatttatcagcgcaatagtaacgatcccaacgattttaaccacagtagatactagtgaaaataactgtctaaagtacttttcttcaatcaagttaagatcattattaatgaaagaaattcgattagaaatttctttttctcctgtttttacaaaatccgtttgcatcaaatgctcacgaaccttttgattaaatagtgctacgttacgattaattactcaattatttaagtattctacaattacaagtaagatttgtaacactgtaattacgataatcattctcaccgtatttggaatacttttccttgtaactaacgcaaagatttcggagtatgaccatgtgctaaaaggcaaagaagtccgcttaaacatgacagaataatactgagcgaaaaccatttgaggtcaataaactttttcataaatgaatctccctttcaattaagttggattcattatctgctttagttcacgataaaaatagctttctgcaaaagtgatcttcaatctgcatatatgcagattattctggaagaatagacagaatattttctaaattacttgccttgatcaatttcttaatagctaatacctgctctgtatctccagcaaaatagcattgataaaaatgaccaatgattttatataagactaaagatggcgtttgacttaattgcccaagtaaataaataggctctttattatcttttacaaatttattttcagcacaagtatataaataattcacacaaatagtggcaattgttgtttgcattttttctgtctgctcagacattttatcattataagtagtgaaaattttttgaaagaaaaaagcaaaatcgtcatgagtaaagatagaggtaccaaaattggctaacaaatctaaactaaatttatcttgaagccaattgtcgcctgcaaacaagcgttgcagtactatatttttatctttgacatcaaatttacgttttctttctagcaaggtaagaatcaacttagctttgattttcagaagatcatgatgcggcagttgttgaatttctgttaccaattttctaacttggttaaagtcttgattataataagcagtctgtaattgatcacctaaattgttttcatcgtcagcttgtgcgactgaattttgcttaaagaattcatcaaatgaaattttatttttctgcaaaattgccattaagtccttagctgatatttcatgcaatccgcgctcaatcttagaataatgggcaggtgataaaattcctgttacaaattgttcttgcgtcagtccccgcgattggcgcgctttttttaatgctgtgttaatttccatagctgtttttatttcaatttacggtcccttttagatacaaaccaaattgtcccatcagaagttgcccagtgtccatcagaagttttatgaaatttcagcgtcagtttcttactgtgtagtgtccagctatttttaccttccattgtgacacggacccggcctaatttttctgaatttattttgttattgtagtctttgggatcatatgaattatgcccatatactttataaattgcttttgctgccgcagtatttggcttaatgtatttataagtaccagatgcatcagtcttaaaaactgggctggatgcatcgatttgaccactatttttccccagagctatgttcaccaacatgccaagatgattttccattacagaatctgtttgatggggatcataggttgtaagatttttattagcaaactgttctggaatagtttgctgattgcgataaaacaaccagccaccgactgccagaactacgactactacaacagttatgattgtagctttctttttcataaaggatcacctgttatctatcagcttttttctgaaaagtaattaatccgtgtgaaactaatctaacagttccgccataataaactacccaacgtactttgccattactgtactcttcatacattctctcccgctgaagatatccattatatgtaccatcattataaggaatttccatcggagtatctacagcaccatcataagcgccataacgcgtcttatgccatgggcctgttctcttaactccatgaacttttttagttaacggtagtttttgaacgttttgaactgaatctgtactagattccgcagcagatacaacagcagtattagtggttgcaaacagagcagttgctgagaataacactaaagttgcttttcttaatttcatatctaacaccttatacctttcttttattgtttattttcattacctagttgttcattatcattgacaacaaaatttgtcatcattttctttttacttgctaatgtaggaattgggtagcttttaagtttagtattatacaaatagccaccgtacataattcctgttggattatgccccattggaacagtgtacatcttttccagatatcctctaaatacctcattgcctcttcttacagtgtaataaacataagtaccctgatcatgatagtattgacgttgataccagatatgttcaacaaatccttttgattcagtgctttgtgttgcagcttgtacatggtttgattgaaccaaagctgaagttgaaactgatactagtgataaagctaatgctgctttagctgttaaagttaaaattttcttatttcttttcataactttaacctactctttttttcttttcttgctttaattactacctaatccagacggaataggaacccatggacccatatttttctctcctttcttatttatttttcattaattttactttcactactaagaactgttcagaaattgtcaaagatgacaattttctacaataaaattcttaatcaaatgagacattccattacttttcataaattcaataatctgatctacttcttcatttttgccatcaaaacaataatggtaataattggcaactattttagcaaaagcattacgtggaatttctggcaatttagaaatgaaatcgtaaattagatttaaatcaattttccttctttgtacgtatacattagccaaataattaatagctattgctgacattatttcttgtagctgaccagacagattagatacattatggcgatacgttctaaatattgaattaatcaaaaagtccatatcttctggggcatatatcatcatagtcattgcaaaaatttgtagagtagattcactccactcatcagaatcaaagacaatttgtctaacttgtcgtttaatattctcagatatttgatcaatttgtttctttaaagatgctattgaaaataccactaaagcataaagattaaatatattctgactttgatttttatattttccaatttcaattttcaaatcttcaagtcgttcgatctgctgatgataatatgcatcttctaattgcttttgccagatcaaatttttgtgagcaagatcattttcactatcttcattttctattcgctctaaaaatatagaagcttgcaatccatgttgctttaacaaatcaattaaatcctgagtctgaatatcatttaatccacgttcaatttttgaatagtaagatgttgataacacatcccccgccatttcagtttgtgataatttcatactttttcttgtttgttttaatgcttcaccaattgtcatatctttccctccctcgtattatcatatttttcattattgtataatgttttgttaattttgcaatagtttgtaaaacaaaagcattatttttatttttcaatcttttatgtttacaaatgtaaacttagcaagtagaataaaaaatgtgaagagatgaaaataaattatttaatttggaggttacggtcatggatgtaactaaaatcattatccttgttgtcgcaatcgccttgatcggctttatcctttggtggttcttcggcaaacatgacgaagctatcggtaaagcaagtgttaatcaaggcacacaagaagctaacatcgtcgttaacggcggttactctccttctaccattgttttaaaacaaggcgtaccagctaaggtgaattttgatatgcaagactctaccgcctgcttatcgcacgttgtttttgaacaacttggcgttaacaaagatttaaccaagcaaaaaatcactacaattaatatcccgactgataaaaaaggcacttataacttcgcctgcggaatggatatgtttcatggaaagattgaggtcaaataatgagtattttttcaaagaatcaaatcaaaaaagttgtcgttaatgcagataatcacggttacaagccagatgtagttaccttcaagcaaggcaagcccgcacaattgaaatttatcccatcagataatatgggctgcatgaatgaaattgtatctaaagacctgggcttcgatcataagctcgatggtcaaaaagaagttgtggtagacatccctaccgaccacgcaggaacttataattacgcatgtggcatggacatgtttcatggaaagatcgtagttaaataatgaaattatctaatattcagcgtttctggatctcctttgtactctccatcccgatgctcattcagatgattgccatgccatttcactggatgatgccaggatacaactggattgcccttattacgacaaccattatcatggcaatctcagctgcaccatattgtaagagtgcttggggcgccttcaaaaagcataacgctaacatgaatacgctagtggccgtcggtactgctgtggcttacttttacagcatctacgctatgttcactggccgcgaagtttacttcgaaagtgctgcttatgtaacggtctttgttctacttggggatgccatggaagaaaaaatgcacagcaacgcttccaacgcactagccaagttagtcgacctacaagctaaagacgcagcagttttacgttacggtgaatttgtcaaagttccactcgaacaagttaagccgggtgatacaattcgcgtaaaaccgggtgaaaagattccggttgatggtgtcatcactgatggctcaactaccatcgacgaatcaatggtcactggtgaaagtatgccggttactaaaaagaaaggcgacaatgtcgttggctcaacgattaacaccaatggtactttcacttttaaggctaccaaggtcggtagcgatacgatgcttgctcagatcgttgatttagttaaaaaggcccaaaccagtcatgctccaattcagaacttgaccgacaaaatttctaatatctttgtcccagtcgttttaattattgcaattattaccttcgtaatttggtatgttttcttaggcgcaacattggttaatgctatgctcttcgccgtttcagtagtcgtaattgcttgtccatgtgcactaggtttagcgacaccaactgctttaatggttggtactgcccgtagcgctaaaatgggcgttttaatcaagaacggtgaagttcttgaagaagttagcgacattgataccgttgtgtttgataagactggtacaattaccgttggtaagccacaagttactaatgttgtaggtgataaaaacaaggtcttaactattgcagctagtttggaagaaaattctgagcacccactagcaaccgctgtagttaaagctgctaaagaagcaaagactgaaattaagtctatacaaaactttgcagctattgaaggccgcggagttaaggcaaactatggcaatcaagaagcttttgttggtagcgatcgtttattagaagatatttctatttcccaggaaatgaaagatcaggctctccaacttcaaaaagaagcaaaaactgtagtctatgttggcctaggtaatgacatcattggcttaattgccattcaagatgtacctaaagcaagttctaagcaagcaattgcggaacttaaaaagcgtggtttaaagacggtgatgcttaccggtgacaatcaaaatgttgctgaagctattggccgtgaagtcggaatcgaccaagtaatcgccggtgttttaccaactgaaaaagccgctgagattaagaaattgcaggatgaaggcaataaagtagcctttgttggtgacgggattaacgacgcacctgcattgtctacagctgatgtcggaattgctatgggatcaggtaccgatattgctattgaatctggcggtatcgtccttgtacagaatgacttaatgggcgtagttagagcgcttgagatttctaagaagacctttaacagaattaaattaaacctcttctgggctctgatttacaacacgatcggcattcccattgctgcaggtttattcatggcctttggcgtgcagcttagtcctgaacttgcaggcttagctatggccttctcttctgtttctgttgtaactagttcacttttattgaataaaacaaaaattgctggtgaaacagctcaagtttcaaagtaaaataattctccgaccggatattttaatccggttttctttttgtaaatttttcaatttgcgacttaaagtttcagcagtaatacccaaatatgatgctaagtctttcttttttaactttaattccacatttttactcccctgtttttgagctaagtcttgcaaataggccattaagcgttcctgagcatccattgaattgcgccgaatagagttagtttcgattgtaaccagctgctcgccaaaattattaagcaaattcaatgctaaatctggcgtctttttcaataacttttgaaaatcacgacgctcaatagaacaaacataagtatcttgtaaagcctgcacaaagttttcctgggcatgttcttgaaaaagattctgctgtccattagcatcgccttgattcagcacacctaatacggtctctttaccgtcttcgttgagattgtaaatcttggcactgccttgatccataaaaagcattccgttcttaccatcacctggttgtcgaataatactgccttttggaaaatattcttggtgcgttgaaattggtactagtttttctaacatttcatttggcaaatttttaaatatggctgctttgcgaatacaagccatgggtgaatgttgcataaaagcctcatttcttgatctaagtcaatttatttttatctgcatcttaatacaatgtatttaacaactcaagcagaaaggaaatattaatcatgactaaatacatcgcacatattgagcctttaaacgctgaaaaaattggtactaaggcacacggtactgccacttttgaagaaaaaggtgatcaactacatattcacgttgagatgtttgatactccagcaaatattgaacactgggaacatttccatggcttcccgaatggtcaaaaagctcatgtaccaactgcagctcaagacgttaaccatgatggctttattgatttaccagaaactgagccggtctcaggaactacaatggtgccacttgatgatgccccagaaaacatgaatattcctcatgatggttatcctgttgccgacagtaatggacattatgaatatgagattgatgtctcattaacaaagctacaaaagaaattcaaagctgcctttggtagcgataaactacaactagacaagcgtgtagtttacgttcatggtgtacctgcagatctggaattacctgatactgtaggtggttgcgtaatgagttatgatgcccatactaccttgccaatcgcagctggtgaaattgaaaaagcttaagttaaaagccattccttgtgaatggctttttgcatcctttcttattttttgatagcatagatatagattatgtaaagtatctaagaaaaggagatgttttataagtaggcttagatcctactcttatggagaataacgaaaaaattatccaagaaaagaaacgcgaaaaatttattaaaactaaaaagaattacaagcgtgcaccactaatgtcagttcacttaagagtgatgatggccgttatcttaggtcaaatcgcctgtggctattccctgggaattagtggtaccgctctttctaatgcagctaaatatatcaacattagtgacttctggactggattaattggggctggtgctttaattggccttgctggtagtcttttggtcggtcgactttctgataaaatcggtcgccgtaaactcttaatgtggaatatgtatatattagctgctttttctttattacatctaataaccgctaattttagcttaacctttatcctccgtattggaattggtttaatgattgctgttgactatactgtagggaatgccttgttaaccgaatggctacctaagggtgaagacagcaagcgccagagtcatttattaatctactggactattggttttattttgtcttacctagctggtagttttatcactggatttgatagttatacttggcaaataatcttagcaacaagtgcagtacctgcactagtaactgctatcttcagaagtcttttcccactccctgcttcaccaggctggctagcaagtaagggtaagattaagacggccaacaaggtcattcgtaagcacatgggacgcaaatggagattacctgcccgctttatgaagcggaataaaaagaaaactcctagaaatatttcctgggcaattttattttccaagcaatatctgcgacgtactctagtaggtgggatgttctatgcctgccaagccttctcatttttcggtattagtatcttcttgccaattttattacaaagcatgaatatcactagtggaaatatctcaggaattatctacaatggtgggatgttcattggtgtgctaatcggtacctggatctttaacaaggttagccgccgcttctatcttatcagtaattttctaatctcaggtctgctaatcggcattttagcaatagtacctaacttaaattcaatacttaaattaggtatttttacgttatttgcgattattttatcagctggtttgatcctagattatccttatccgactgaattatttgatctgaaggtacgagcaactggtgtaggtacttgtattacaatcagccgaatcggggctgccgcagggactttcttattgcccgtcttaactaatgtgggtggtgctagcctggcaatgctagtttgtgcgattgttttactctttgcctttatcgtttgcctcatctgggcaccggagacctcaccccaatttatgaaaaaataaaataattaatatgctacacaaaaagacagattacatatgatgcaatctgtcttttcttatttcttatcttttttcttcttgtccttagaatccttatttaataattcttctggatccttatgcttaggcgtcttctttggatctggtacagttgcaaagcgatcaagcatcttctgtaagttattagggttgtcaaaagttaatcccataaaacatcttcctttcgttttctcaattatattaaaatttcaattcaaatgacaataattttaaccctcattatcaataaattgttgcatcttaatcatttctgaaccagccagatcaacactaattaaatcactataatcatgaacactagtatctcctaaaccatattcagttacaatttttaggtcgaagccactatcagagcgatcttcaattaagcctaaacgatcaggataatgataaattgaatcactaattttcactatttgatcttcgggccaattatcaataatttctgctggtgactgaatttcatcccgtaatttaactgaacgctccagcctgtccggatcaaaactgccattatttttttgccattgaactaaaaaattaaagaagagcaagcgctcggaatcttcagtaatatgcgttatatggctcctagcaatcactgcaattgattcaacctgccctaactcattgatgctctcgaataccagattatcatcgtcatacttgagtactttaccaatagcaaaactaccatattgatcatcaaaggtataatcaaaataaatttcaaccagatccaagtcgttagtgaattcttgcttctgtgattgccgcaaatattgggtaaataagcgattatcaatggcattagtatcgacacaaacaatatcgtcaagtggtataacggtggcataatgctctaaagttaattcattgcgttctaaaatacgcacctcttgctgatcaagttgagtaattaagccagtgtaagtagcacctgtattcacctcaaaagttgtaaagggttgcgcgtcagctacgttaatcagtaaatcatgcagattagtaaaatcccaggctaacactgtcttatttaattgctctaagttaaatgaatccttaacttgggtaatcatataatagcgtagattaggcgtatcgtcttcaatcttagctacttgatcttctttaataaagactattccacctaaattaccgccttgatcgactgattcaaaggtaatccagccatgatgttgcgtgataatgcggccaatatagtaagaatttgcatcaactaccgtaatacttgcatccccacctaagttatatttttcttgatcagccttaagcgtgatttgtacaagtttattcaatttttcgccccctcttttttcttccgtgaatttaattgtcgcctaatcattatttttctgcaagaaaaaagaagatggtttagccatcttctaatattgagttaattctgtagaattttggggctaacgaatattacttcttttgtgcagctgcctcagcttctgctgctgtgtttgaaggggttaacgaagtactgtttggatcaaaacgcacatcgcttgcttttacataaccatcagcaaattggacttcaccttgattactatagacagatttaccaactaagtgataaaacagttctgccttattttcacttggtacccagatgtaaagcaacttatttaccttgtatcttccaccttgttttctaacttgatcgcccttgaagtcaatcttgtttccgttagcatcatagatatcagttggcttaataaattgaattagtgattttttagtatgataataattttgaactggaatatctttagcagctttaacattgaaattataaatccaataatcagttcccttaatatgatagattgctaattcgttgtcatcgtcaccatctctaccagtatcagcacgtgtcccttgctctaaacgatccactgtaaacttatcaccttgttttgcgtattttcctgaaggctgaactgcatctttatcaggtacttcaacaaaaagagcagcacgtttatcagttacagtaacagtcgtttcttctgatttagttgtttgagacgaagaagaactagtgttgttatttgtattaacactaattacaggacctaaattataagacttaatgtactgtttattaggtccacctattctaaagtaatgctttccgttcttaaatttgtatgaaccgccataagtcgtgatagtttcacccttatacaatttccaacggttattgtaagaggttctgccagttgaggtacgataaatgtaagtattatgagtaatcttacgtgttacaccatcaatgttggtagcctttatgtattgatccttgccgcttactttatagtaaagcgagccgtcaattttcacagggttgctttcaacagtgacatattgataggcattgtattttacacctgtgctgttaccatccttgtcgtaagctaaagcagtatgcataactgctttagtcgtagcagcttgtacttcattagttgtattagtcaaaacagccaagggtgcaactgtcattaatgtagctgcagaaattaatgcaatcttatttttcttcatcataatcatccttttcaaatctctacactgctattatattctctaaagctaattaaagcattaaaaagaagccaattaagtgaagtggacttctacttttgatattttcttttaatttattttttcaatgccgttgcctcagcttctgctgctgtgtttgaaggggttaatgtcaaacctatattaacaaatttaacatcactagctttaacataggcatcattaccaacttcaatttgatcaacgttacctgtagcatagaacttagtaccaactaaatggtagaataattctgccttgttttcacttggtacccaaatgtatatgagtttatctactttcagatttccaccttgttttacaatttttgcgccattgtggttttgcatagtaccgtcagcattatacacatcagtatccttgacaaatttgatatagccataatgttcgtgatcataatcatgctttactaattttttatcggcagttacatcaatagctaaaagccaattgtctgtaccttttattctatacattccagcttgtgctgcagttgatggaaaatgatcagcaaacggagtaacttctagtttatctacaataaacttcgtaccagctttgagattctttttgattgctttaccttgattatcataaatatttacaccgtaagcattttttacggtaacagttgcttcctcggcattagtattagtagcgttgtttgattcattgctggttaaatttgatgcagtattagtactaataactgggcctaaattatatgatctaatatattgcttacgtggcccacctactctaaagtaacgtttaccgtttttaaatttatatgatccaccatatgtagttacggtttcacctttataaaatttccatttcttactgttggcagtcataccataaggtgtcctttgagtagaagtccggtatatataagcattatgagtaatctttcgggttacaccatcaatattagttactttgatatattcatctttatctgtaactttgtaatattgacttccattgatagttactagttttggatctacatgaacactaccataaacgtaatatttatgaccggtactatttccatctttatcataagctaatgcgttgtgcataatagtcttggttattgaagaatctgcttgtactgtatgagcgctagttgtagtactcaggataggtgccgttcccattaaagctactacagaaattaacatgattttattttttttcattattaaccaccctttgaaaatctctatacttcaattatcttactttgtataaacttagacaacaaaaatagcatcaaatcatattgatttgatgctattaaggctaaaatttacaaatttagtcccaagctaattcataaaccttatttgaaacagttttatttttaccgttaacattagcatggtatgcaacagttaagtaaccgtgattttcatcaataatttggatactttcaacttcactatgttcacctgaaatatctaatccaccaaatgcacttaagtttacattttcccattgagattgatcattacgtgcataaaacggaatttttacaatttccttgtgatagtatgaccatgaaccattacttaaacttggtgatttttgactagtaatataaatattaccagaattatcaagatcataaccttgtacagagtttaaaacagatccatacaaaccatatactgtaaaactagtttcacattgataatttcccatatttacgaaaccattatttccagcctcatctaatgcattattaatgacatttaggtcataaattgaaaagtggcctgttccattattctcaatagtagcaattaaaagcatactataatctggtgaaactgctacttcagcgcgttccatttcatcaccagagcattgatcttcaggattacctgcgcggttcaagtatgctaaacgtgggaattcagtatttgatgaagcatatgatttgtatctaatatctgctcgagcaatttgagaagcccatttattcttgtttttagtaccaacgaaccatttaccagatctacctgaatattcccaagtttgggtgtgtccagctgctgcacctactaaagtaagcacaggggttgtcacgttgccacggaagccacgcaatacatgtgtttctgtctggttatttcttaactgtaaaccataaacatactttgatcctacattacctttttgaactacagctctgtaacctgtattcatatcgaatctatctaaaattctaatatttgttgcatctaacataataaaacctccgaaaaatttaaaaactactacttatcctgagtttgctcattcatctgtttagccacttccgcaaagatgtcctgcacttcttgcctgttcagcttgaagccttttgcttcaaggctgttcactactgcgttgccaacacggttaatcttctgttcgtcagaaagattttctttgtcgtataagcgtacatagcttttcattaagctatctgcagtattgcggaattgctctaagcgtttattcttgaaatgaactctgctcaagatgccaatacctactacgctaattacccataacgccagagtaatcagctcaacgtaatcatgaatatccataattgaatgaatcacctctcttttgatcaaacgatccaagggggctaacgaatgtccattggacttcacctctgtttgataatgttcaacaagacactaatacacttgatttatattagtttttagactaatataaatgtataagaaataaccgaaagctggtaaatgttccgccaagaattttattaacttaggttgttttctttttcatatctcgttgacaatatttactataagttaattaactaattatgtcaataaaaaaagctaaaaaactattattttttcgaacaagtattcttgaaaggcttggtatgattgagttagagcgcacaaaagaattagcaaaaaaatacaaaatgaatctccgtgaagtaaatgacaaggcaggtttaggtagaaattccatctataattggaagaatcaaagaccaggaattgatgcacttaatgcagtcgcagatgtactacatacgtcagccgattatttaagtggtaagacaaacaatcctagcccgtcacctaaaggtgatgaaactggtggtatttctattgatggtgaagtaccatatttctatcatggctacactattccagaagactacctgaacatagttcgtcaacttatggaacgtgatatcaaaaaaggacttattaaacgacatgacaacagcagatcagaataaacaagaactcatagactggttattagcctatgctaaaaaacgtgatattatggttgaattagttgaagtaaatccaacttacccatccatttctttaaagaactatagattcgctgtcattaatactaattggcatcatcaagaagaagtaccattttcaataggtcatgagattggtcacattatgctgactaatggtgaagtagattctcgtcaatatatcacttttacagaacagaattccgaagaaagtccagcagacatcttttcaataaagctaatctataattactcctgcaaaatgggtgattgcttcgaagatacaggtttatttatgcaagcatacgggataccaaatcgagtagctgatgcaactaaagagatatttaagcgagcagcttaaccatcaacttctatattgatttgattactaaaagttttagcattagtttttacactacttaaaatccaattaaacaaaaaatcgctactcaattgagtaacgattttttctatccatccagttcaacgccttgcaagtccttcatcttgctataaaccgcgccacgttgacttgaatcaaactccagaataagcatatctccgccgcgaattacggtttgaccatttggtatgatctcatctccatcgcggtgaattgttcttaccctagtatcaaccggccattgaacctcagaaatggttttatcaaccagtctactgctctcatagaccggcagagccattgtatcagcctgaccagtatagttagccttatggtcactactcttgtccatagcggctgctagaagcccgtagataggcttaccgccaagaagttcatcaactaataacgcaatgaaggccaccacagctaatggcatcaagtgaagtaaggaccctaccatctcagtaattaagataatcgccgtaaatggtgcacgaatgattgctgcaaaatatcctgccattgaaaaaatcactaggttaactactaaacgctgcggtaacaagcctaactgtaccatcatcagtccataagttgcaccaatcaaagcgcccattgtcaaaattggcaggaagataccactaggaagacctgaatcataagcaacaatggagaaaacaattctcatgacataatagaaggctagcatccctacaatgccccaacctgttttagtgattatattcggcaatgccagaattaaccgattacctggaccggtgattaatggccaaaagtaagcaatcgggattaatattgccaaaggaataagtccatgcagccaacgaggtaaaatggtgattttagcatagaccttctttaaactaaataaaccaactttatataaatgacccaataagcctaataaaatccctaagataagcaagtgccagtacaacgaaatcggaaatgaatagttatattgaattgctagggcgtgacgaatgccaaacaagtttgaaacgacaaagtttgaagcaattgcgccagctaaagcattcatccaaactaatggtgaaaagttatggaatacttcttctaagacaaacaaggcaccactcaaaggagcgccaaaagcggcagacaaaccacttgaagcccctgttgcaagcagaattctagtttttaatttgttctgcttgcatccctgagcaacaccttgaccaattgtcgagcccagctgcaatgatggtccttctggtcctaggaatagccctgtgccgataaccaagataccaccgattaatttccgccataaaattggaaaccattgtagtgatagcttcccttgcagttgcaattttacttctggaataccagaaccaccaacatggggatattgtttaacaaaataaccagcaattaccgctaccgcaataaagccaatgataatcgcaataaaccacaacggattctggtgcgctaattgaaacaagtataaccaaaaaccagatgtcttttcgattccaaatctaaataaaccaactactacgccggtacatattccgacaagtagtgcttggagcaacagtttaatattagttctgtttgcctcgtctttcattactttctccctcacaataaaaaaaacgtgtcacaaactattgtacaacaaaaagccagctagaaatgttccaatgtcattaagttaagacattgacaattaagggtgcttttttagagatcgaatcatttggattcgatctctttttttgtataaaataaaggcgaaaagaccagccttttcgcctatcttatatattatatattttaaaccttcaaaattattgccagaaagatggtgttaattatgaaagcccttcataagaatattctagaacgtcttgatcaaattatcaataatactggggatcatattcacgattttattaataatcctcatgcttttaccaggaaacgcactttagatgcagcgacagtccttaaaactacaattaacatgcaaggtcagaatttaaacagtgaactctttagagcttttggcgaagatgcaactaaaaagaacgataaagtagttagtacttctgcctatgttcaacgcaaaagccagctttctcctgcttgttttaaacatattctgactgtttttaatcaaaatctatttaatattcaactttttgatcatcactaccgtttgtttgccattgatggctctgactttaatcaaatctggaatccgaaatcgaataacattgtacaagcttcttctcataaaaagaaaccctattgtcaaattcacgttaatgccttatatgatctattgaataatacctaccaggattgtatttttcagcctaaatcagaaatggatgaacgcaaagcggctgttcaaatgcttaaagctttgaattgtggtccatatattgtaacaatggatcgtggctacactagtttcaatatgattgaaaactgcaatcgcctgcctaactgtcattacataatacgaactaaggctggacaaggcggagttaaagaaataacgacattgcctgatcaagaatgtgatcgtgagatttcctgcctggtaactacttctaactattactacatcacgcataaagccagtgagaatattcaccatgtccagcatcattatcgccaatatattaagtatcgctctaaaaatacccaggatctaagctgggattttggcgagttatgcacaataaaatttcgagcctgcaaatttagaattaatgatgccaaatcaggcaaagaagaatgggaagttgtgctaaccaatcttgatcgaaaaaattatccgctaaaaagaattaaagagctttatcatctgcgttggggtattgagacctccttcaagaaattgaagtattctttaggcagtgtacagttccattccaaacaagataaatttattgaaatggaaatttatgcccatatgattatgtttaatgcaatcagtcaaattgatgcacaggcctatattccgcaaaagcattgcaagtatcaatatgccatcaatttcaagcaatcatgcttgattattcagagcatgtatttggcttcttctttaacgcaagattttgaacggatccttattcagatcagctattataccattccaattagaccaggccgcaaggacaagagaaatattaagcccaaatcagctgtatattatttatatcgcgtagcttaaaaaagcagaatctgtgctatgccttatttgttgtacgaaaaaagcaccaatttaaccaattaaatgttaaatcagtgctttaaaagtctaatattaattgtcaatgtcttaacttaatgacattggaaatgttctaactgacttttttgtttcatgtgaaactaattatttttcttcataccattcggtgtggaagacgccttcacgatcatttctaaggtaagtgtgcgcaccgaagtagtcacgttggccttggatcatattagctggcaagtttggattaaagattgattccaaccagttaagagctgcgctcaaagttggagttggcacaccacacttagtagcaaattcaactgacttacgcaaagctggcaagttttccttcatcaaaccgcggaaataatcgtcttggaataggttcattagcttgccgttcttgtcataggctttttcaatatccttaagcattgcggaacgaatgatacaacctgcttcccaatcttgagcaattgacttgtatcttaagtcccaatcataagcttcagcagccattgtcaattgttggaaaccttgagcataggcaacagcttgggctaattgcaatgatttttcgaatacgtcaaccatatcatcaggaatttcaccattgtattcaaacttagttggtttaacgcccttttcaattgtcaagtgtgcttgcttactcatgaaacgtgccattacagcctcggctaccaccgttacaggagcgccaagtgcaacaccatcttcgagcatccagttaccagtacctttgtatgaagcaacgttcaaaatgtgatcgattacgtgatctggcgttaaatcatctttttgtgccaaaacctttgaagtgatttcgctaagatatgcttctaccttaccatgattccatttatcaaaaatttctgacatttcatcatcgctcttgtgagcaacgtcacggagtaagttgtaaacttctgaaaattcctgcataataccgtattcgataccattgtgcaccattttgacatagtgaccagcaccttcaggtcccatgtagtagacacatggcttgccttcagtattcttagcggcaatagcttcaagaattggagcaacttccttataggctggttcatcaccacctggcatcaaagctggaccattcaaggcaccctcttcaccaccggaaacacccataccaataaaatgaatgccgtgcttttccatttcgtggaaacgacggttagtatcgtgataatttgagttaccaccatcgattaaaatatcgcctttatccaaaagcggcagcaatttttgcaaagtttggtccactggatcgcctgccataatttgaatcaaaatcttgcgtggcttttcaagtgagtttacgaactcttcccaggtgtagcaaggctttaatttatcatcttcatattttgcgaaagcatcaacttctggtttgtcgattgagaaaccggaaacggagaagccgtggtttctaacattcaaagcaaggttcttgcccataacagacaaaccgataacgccgaattgttgcatgtttattaattcctccattaatcaaagttcatcaagtattattatacgttctagcaatagagtagagggagttttataactcgcccctctcattgcaccggacgtacggttccgtatccggcgctacgtttgtgattatttacgagataaataatattctagcggatcgaccaagcctgggcgatccgctttgcttatgcccaatacttttgggctaagcagaaagttaatgacatgacccgtacttcttttataccaacctaagcgcgtattagctactttatgaatatcttcatcactaaaattgcactttagtgccttgttaatccgcattaagttaatgtatattcgttttggtagtttccattgtttaatgattaccacccgtactttatgacgcagccattgactgaacttaattagaaaatatttcatgtcgccaactctaaagtaattgacccagcctctaactacttgatttatcttagtaaagactagtgatagaggctgagcagctgcttttctgcgacagagaagttctctcatcttgtcataaagcttgattttgcggtcatctcctggctttgcttgccagtattcgccacttttccagaaggtaaagccaagaaagttgctcttggttggtcgtacaactttggttttggttgcgttgacctttaggaatagctttctttctagccatgatgaaattgaattcatcacacgtttggctgatttaccgcttttgacaaagatattgcagtcatcggcatagcggacaaagcgcaggcctctttgttccaattctttatccattttatctaaatagatattggatagaattggtgaaagagggccgccttgtggtacacctagtttattaggcttaacccaaccatcttccattactccagctttaagaaaggctcgaattaaatggagggtggttttgtcatttacttgctctctaattattgaaattaatttatcatgatttaccgtgtcaaagtatttctcaatatccaggtcaacaacccattgatagccttcgtttaaatattccaagacttgttcaatagcgtcatgagcactgcgtccaggtctaaagccatagctatgctcactaaaatgaggatcatagatcttcattaatacttgggcaatagcctgctggattactcggtcaacaaccgtgggtattcctaaaggacgtttcttaccattagctttaggaatgtagactctgcgaacagcttgcggacgatacttcatcttcatgatggcgtcctttatttctacttgatgctttttaaaatagctatcaagctcatcaactgttctcctgtctacaccaggcgctcccttattgattttgactctcctgattgcttccttgagattattttgacttaaaatctgttcaattagttccatctcgtgatatctccatttctacttgtaaatttattcagaattgtcccaattgctttcaccatcaaagagttacgttctctttgtgctaggctatcctcttatccggactgtctgaacattgcttatagcgagatatgctcttacaaacattaggcccttcgctccagtttcattacaaaaccttcagcactactacgacctcagctgacttctcgcgattaacctttttcgaccaggcttacgatcgctgatattaaagcttactcggtttcacctgtccacgagatctctcggggtaagacattcatctttaattttccactgccccctggtttaccgtcttggttttacggttgtcctttggactttaacttgtgctgcagtctcatccaccatttggcctgaccaggtttctgtacgtaggctcggaaaactcgctagccacttccttcacccatagcgtcaccgctaacggcttgtggttcgctacacttggcgacaactacccgtgatctagactttcactagactagacaaatgccatgcccgacacaccgcaaaaaaaagcgaaaccaaaaggttccgctttttaaaatctagttaataatttttttgttattgggtaaaggtgtttcacacactgctcggtaatatttcctaggaaatattacttttattgatcaataccccaaagtaaaatgttaaatgctaatggtaatgttagcttggtaatgtatccatcctttttagcctgttttaaagatgctagaacaaatttacgttgttgacccgttagctttttggctactttaacagctaaattaaagtcatactcgttttttctaatagcatttttgataactatctttgcccacagaaataggttgagaatcggagtttacagttacaatgtagctccacttgctaagtcgaggaatatttttaattgttatagctttatcaaacttagctactgcagttgaattgctgttgtctgcagcgttggcagtgacagacgatgctgaaaataatgctgcaagtaaagcagtagcaagtaaactaattagagcttttttagatttcataatttagcatctttttacacatagtgcttattggctaataagcattaattcatatccaacactgtctattataagcatctgtattctatttactagccaacaaactattttatatttaaaatcgtatataaaatgaggctatttcccaggaaatattttcccatacaaaaaaagcgggacaaacgtctcgcttctttataattactcaaccaaattagtgttgtgaagcacctgaaaccgtatcaggagcaggatcctcttctggttctgattcttcatgttgagatgcacctgttgcagcgtcagcttctaagccgtacttttctgcaaagtaactgaatggcttcaagtcttcagcttgatacttcttgacaaaggctgggtcgtcaagtgagttcaactcagttgagtaaggcatttcgtgagtgtacttgacgtcgatcaacattggaccgtccatcttcttgaattcgtcgacagcatcttcgaattccttcttggtgcgaaccgttacacccttaacattcataccttcagcaacctttgcccagtcgttatcagggataataacaccagataatggttggtgagattcatcttcttgttctgcttgaatgtaacctagtgtttcgttagtaaatacaatattcaaaacatgcatgttgtaacgagccatagtaagaagttcttggttcatcatagcaaaaccaccgtcaccagctaattgccatacttcacggtctgggtaaacagttgctgcagtaagagcagctggagcaccataacccatagttgcgtgcaagcctgaagtagtccacttttgatcatcatgcaagttcaaaagacggcatgagtcaacgttaacgttaccaacatcaatagcaaagatggcgttgtcatcagccttcttgttgataacatcccagattggttcaggacgtacaggcatttcatctgagttcttaaagcttgcttgccatgcatcccagttctcacggtctgcaatagcagccttgtaaagtggtgattcgctacgttcttcaccagcgtcaataattgctctcaaagccttcttagcatctgcaagcattgaaacatcagttgagtgacgcttaccaaacttagctgaatcaacatcaatttggataaccttagcgttcttagggaaccataaaactgagaatggtgagttgttacctacccaaacaactaagtcagttgcgctttggacttcttgagcagccttaggtccgatacggccgatagtacccatgtatgctgggaatttgtcttctactacacccttgcctaagtatgatgacataataggggtcttgaacttttcagcaaattccttaacttcttcaccagcatcctttgcacctaaaccaatgtacatggttgggttcttagcttctttcaaaagcttaacagcttcttcaactgaagccttagttggtgctggataattgtctgctggatgagcatccttgtttacacggaaggtgtcatcaatcttttgccaaccgtagtccttaggaataatgataactgcaggaccctttcttgcgtaggcttgacggatagcttcatcagttaaaattggaatttgttcagcggtcttagcttggcggcaccaaacactagcgttcaagaaccacttgtcttcatcaaaagcttggaagaagtcaatatcttgacggctagttggaacgttagcaacaattgctaccattggagtcttgtcaaacttagcatcatacaaaccattgaataagtgggcagcaccaggaccagctgaaccgaaacatacacccaacttaccagttaacttatattctgcagaagcagctaaagcaccagcttcttcgtgacgtacttcaataaatttcatcttatctctaaagtcatagatagcgttcatacttgagtcgaatgaaccacctgggaaaccgtagatatgatcaattccccaatcgtaaataactttaagcattgcatcagaaccattaatttttgtcatataagtgcatctccttaatttttgttctttcataatgtattaaaacactttttttcacatttgcaaaccgataaaatcaccgttattacgcaaatgaaaacgcttttgtaataataatcacttcacaagctttaccaaattcaatatctcaaaaagctgaatggtagcgttttatattgtgatttgatgaacattattatactaaatttcacttattttatgtatattcattgttacttatagtaaaaatttaagaaaaaattttttacaatttatttcatagctatccaatttagaaaaacgttattttataattttgcgcataaaaataacgtagaatactattcctacgctatttttgtgctattctactttttcactctagagtaacgcccattttgaatgtaaacactcaagattgccaagtcagctgggttaactcctgaaattcgttctgcttgagctaaagtttcaggacgaattttttcaaatttttgccgtgcctcagtagctaaaccttcgatttggtcataatcaatatctgctgggatttttttggcttcttgtctctttaagcgagcaattctggtttcttctttcttgatatagccagcatacttgataccaatctcaacttgttctttaacgtaacgatcgcctggaactttttcaccagttaaccgttcaatatcagcaatagtaacattagggcgacgcaagaaaacatcggccttaacaccggccttcattggttcctgaccaatactttgcaaaaattcctgcacctcatcagttaaatgaaccgtaatttcatgcagtctcgtctttgcatcttcaatcgcatgcttcttttcttcaaatcgtgcgaagcgttcgtcagaaattaagcccagatcatgaccatattcagtcaaacgcaagtctgcgttatcattgcgtaaaatcaaacgatattctgctctactagtaagtagacgatatggttcattcgtccctttggttaccaagtcatcgattaacacgccaatgtaagcatcgttacggcctaaggtaaatcctggcttatcttgagcagataatgccgcattaattcctgcaattaaaccttgaccagctgcttcttcataacctgatgttccattcatctggcctgcagtaaataaatgctttacgtttttggtttccaaagtatgcttcaattgccatggttcaaccacatcgtattcaattgcatatcctggtcgcatcatttccgcatgttctaatcccgcaacagaatgaatcatctttaattgaatttcttctggcattgaagttgaaaagtcgcctacataaacttccttggtagtctttccttctggttcaaggaaaatttggtggcgatccttatctgcaaagcggacaactttgtcttcaattgaaggacaataacgtgggcctacacccttgataattccagagaacatcggtgcacggtcaagattgtttctaataatcgtgtgtgtggttggattagtataagtcatccaacaagaaatttgtttttgtaaataatcttcatcacgactttcatatgaaaagtgccgtgggattttatcaccaggttcttcctcagttttagaatagtcaattgtattgccgttaacacgtggaggagtaccggttttaaaacgacgcagcttaaaacctaacttttctagattttccgacagcttaattgaaggagtagtgttatttggacctgaagaataagtcaattccccaataataattttaccgcgagccgctgtacctgtagtcaaaacaacgcttttagcatgatacttcgcaccagtattggtaatcacacctttgcagacgccatcttcaactaccaattcatccacgatagcctgacgcaaggtcaagttgggcgtattttcgatcgtatccttcatgtgttcatgatattgccacttatcagcttgagcacgtagcgcacgcacagctggccccttacccgtatttaacatccgcatttggatataggtagcatcaatgttctttcccatttgaccacctaaagcatcaatctcacggacaactgtccctttagctggtccaccaacagatggattacatggcataaaggccaccatatccaaaccaatcgtaaccagcaaagttttttgtcccatgtgggcacttgccaacgcagcttcacatccagcatgcccagcaccgacaacgattacatcatattcatttgaatcatatgttttaaccattttcatcctactttcctaaacagaattgactaaataattgcgtgattaattcatctggggcactttcaccagtgatttcacctaaagtatcccaagcaccagtaaaatcaatttgtgcaatatcaacagggacgccatcttcaactgcttgaattacatcttccaattctttcttagccttatgcaataaggaagcttggcgttgattggttaccataatttgatcattagaattttcaatcccagcaaaaaatagcttattaatcaattcttcaagcgcatctaagttttgttctttcaaaatcgaagttgaaataacatcactacccgttagtttctccatctcagtagttgttattttttgacctaaatccgacttatttaagatcacgattcgcttcttgtcctttgttgcttcaattaaggcttgatcttcagctgttaatgcttgactagcatcgattaacaacaagaccagatctgctcgctccaaggccttttttgatctttctacaccaattttttccaccttatcttcagtgtggtggattccagcagtatcaattagctctagcggtactccttttacagacacatattcttctaacgtatcacgcgttgttccagccacatcggtcacaatcgctttgtcgctttgagtcagataattcaataaagaagactttcccacattaggacgaccaacaattgcagtagccaaaccattgcgcaagatttttccttcttgtgctgtcttcaataagcgattaattttatcaattactgatctagatgtgtctgccatctgttttgcggtaacagtatctgcatcatactctggataatcgatattaacctcaacgttagccaaagtattcagaatttcctgccgcattgcctgaatcttgtgtaacaatccaccagctaattgaccaacagccacttgtcgtgccttatccgtcttggcccgaacgatatccatcacactctcagcttgagttaagtcaattcgtccgttcacaaaagcacgtttagtaaattcaccaggatcagccattcgcgcaccgtgactcagcaacaattgtaaaatatgattagttaccacgattccgccatggcaattgatttctacaatatcttcacgtgtaaaggtcttgggcgcacgcagcactgtcaccattgcttcatcaatcgttttcccagtatccggatcgataatatgaccatagtgaatagtatgtgtcggcaccttgcttagatcttcgcctttaaaaacctcatcagcaatcttaattgcatcctcaccagacattcttacgattgaaattccgccttcaccgatgggggttgaaattgctgcaatagtatcgaactctgtcaaagtttgagccataattcttcccttttctcaataaaaaaagcgcattataccaccacgaataaccatgatggataaagcactttgactactttatctaaaaatcattttagactaatattcttttatttctttttgcgtcctaaacgcttgtaagcccttcttagtttacgtttgcgttcacgctcagcctcagcctttgcttcttgctctcttctatatttaatagggttttgcaagataaaggtttgaagcgcctggaacaagttggaaattacccagtaaagtgtaatagctgactggaagtttaaggccatcacaccaaccatgatagacattccgtacatcattactttggtcattccattttgcgatgattttggcgtcgataattgactaatatacgtcgataagaacgtaaagatcattgctaaaataggcatgatgtaatatggatcgggcttgcttaaatccatccataagaagcgcccattttgtaactgcggtgtacgtaaaatcgcaccatacagtgcatacataactggcaactggatcaggacaggcaaacatccagtataaggatttacgcctgcttctttataaagcttgttagtttcttgttgtaataatgttcttgattcagtgtcacgtcctggatatttcttacgcaactcattaatttgtggttgaatgctttgcatcttagtagtacttcgaattgaaatagcattcaaaggtactaagatgacacgaacaatgacggtgaagacaataattgcccagccataactgttccccattaacttagctagccccaaaataaaagctgacatgtaataaacgatccaacggtcccaccaattaccacttgtatgtgagattggcgttgcttgaccatttgctcccgtagtagcacatcctgtcaatacaacagcaagtattgctactgctaagactgcaagaagacgtttgacatttctcttggtcagaatgtccttcaatctatttttcctcaactttatctggcatttcttcaataatatgagctaacgataatgcgtgaagcaagtttttacgcacctgagccatattaaaatcgcgagcataaggtcgcgtaatgattaaaaaatcaacatgcggattaatctgcaatttttcttcatcaatcacggcccgaatataacgcttgagtcgattacgtgcgactgcggtatgaccaacctttttgcccacagaaattcctactcgaaagtgtttattttctgttttttctaccttataaatgacaaaagctcggttagcgactgagtcgccagattcgaaaacttgctggaaatctttttcagattttactcgataagactttctcaaaacgtttcattccactctagtagactaaaaaaaccactgggattcagtggtttaagcagataagacttttctaccttttgcacggcgtcttgctaaaaccttacggccatttgatgtgctcatacgcttcataaaaccgtgaacacgtgaacggtgacgcttcttaggttggtaagttctcttagttgtcatattaaactgcacctccataaatttttgtgccaattgcacaatgtcttattaaggatagcacgaaaagccataaaaaccaagtattttaagaaaaaaagacttttaaatcccgtgaatattttctaaaaattcattgtttttcatgtggataaaaaataaaatatttttcttacgtataatttccacaagataattcccaacgttttccacaactcacatggtgttaaaaacttaattcacaccatgtggataacgcatatggtattttacctcaagtattgatagaatagtatccataattcacagctgtactgtgcataaattaacggttttgctcttatcatgtcaaaatgtgcatatcgctttaatagttgtcaacaggctgtgtgctttgttgatttctttttcacctgtggaaaaccagttaagtaaatggtaaaataaatttgctttttactaactgggggaatgtaca

SEQ ID NO: 13 - DNA, 201881 bp, Lactobacillus crispatus
  source 1..201881: mol_type = genomic DNA
catatgactaaacactggattcttttgaccgcattcacagcagatacggctggtatactgcggtgctacgacaatcagctttttgccgtaccactcgcacttgtactcaagcatctgtctgaacattctccagcctgcattggctatattgtgagcgagcttgtgattgcacatgaggttcttggttttcaaatcctcaatggcaatgacatcgtaatgcttaaccagccaagtagtaactttttgcaggtaatcatagcgtttattggctatttttagctgatacttgctcttagtcttacggagcttctgccaattctgaaaatcatacttttcaatcttggcttctttatgctcatggttgaaacgtgctactcgtttttcaatagcactgcggttgcggtcgaagcggctctgtaccttgttcttttgtttctcaagagcaaaggtatcgggtacgctccagcggtggctatcgctggtgaccagccattccttgcctaagccgacatcaatgccgaccgccttgccggtcttttttattttttcgtcatacttaggcaaattctttttctccttaaccacggtaaagctcaaatagaaacggtctaaatcttgccgatatttaatcatcatccgcttaatcgtacagccctttaagtacttcaaagagctggtgtgcagtaaaagcttcttgccgacctgtaaggtgtgcggatcaactacatgaatctgatcgccttcctgtaccgtattattctttttaagcttatagcggtaatgcacgtttttaatcgtagcgctttgcatgtaatagtggcgtgatttgaacttaggcggttttctgcctttaggcttctgcttaaagaaggcttcctgcgcattgcagtagtattctgccgtagcctgcaaggaagtcgagtcgatttttttgagccactcctgttcctgttttaagcggggcaagaggcgctttaatgaagaagcggaaggaaaagagagcttgggattattcccatagcgcttatccgtcatgtctttaatctggttccagaaccagcggttagcgccaaaaaggttaatgaaatagaccttctgctcatccgtaggataggcacggacgctgttaatgccaaatttgatttcattttccttctgcttgctttgctggcgcattcctttcacttcctttgctttagctacttatacggacgctcctattgcgtttctacgtaatgcttgattgtttcttccgaacagttgcctacggtgcgtgcaaaataggatggcgaccataggtgatgatgatagaactgctctcgtaactccggcttttgtttaaacagccagcgagcggttgtgcctttcagtttcttgattaaaacggtaaccgacatccacggtggcatgactacttccaagtggacatgattaggcataaccgttagggcttctgccttgcaggagttctcctcaagtatttccctgatcttctgatccagcatttgtctggtttcctgatctagggctttattgcggtacttggtcacccagaccaagtgatagatcaaaacagacacactggaagaagtatgatattcttcaaccattaagtttcatcctaactattgatattattatttttattgacataattattataccattaaggtacatagagcaacaaaaaaggagcaagaccgaatgcatcccctcatcaatagatggggaggtattgttcgttctttctcctcgctttttgttcaatttgcataagaaattattgtctaaccgatttgtgatctagtaatcattttttagctttatttttaggtgctttcttgttggaagctttagcgatattctttgtatcctctttagcgaagaaatcagtaccaatttctttatttatgaagtagtaattagagtgatcgacatatcgttgaattggaaaatcccatgcagatagactacgttgattacctatatcaatccaatcttggtgcattttctctaattttttcttttcaatatcgtcattctgaactttagcttcatttaaaattgcttgtaatctttcattatcattaagaatattgatatcttgatctaatggaataccttttttatcattttttatttgaaataagaaggtaaaactatcaaagagcattaaacctattccattgatatacgcacgcattatagctaagaaagtacctacaacagtagctagaaatccaccttgaggtataggaaatctgcgcactttataactaataaagatgctgacgacaatatcacgacttaatgatggtggtctcttacgcaatttgctcggattgatatcaaaaaagaaatatctaaagggaataaaactagcgatcaagaaagtttttagaacgttggcagtgatggcataatacaaaatactaacgaacaacgaaaaccaacaagcagctaaaagactgcggttaaaaattaccgatagcgataaaacctgatcgtcatgtaaattaccatgttcatacataactgccacctgcttccctattcttcatcaattaaaagcttaaatctttctagcatcaaatgtgtttaaacccttgatatcagtattagctctattattagataattcatttgtataagactttggagttactgagagcatatcatggttaattacatcaaacatttcaccacgtctactaccagaatctaataattctcgtacatcttggcgcaaacttctttgtttatcaacatccaaagaaccatcaagataattgatacctctgctcgtgtcataatagaatccatttcctttaacctccattttaataggaatctgaactctagcaccctcaggcattccatgtaaaaatgattctgaatatttgcttgaaagtacttgagtttgattatcgctattagattccccagtgattacactaccattccgatcaaaatcaagataataattaccataatcattacttgagctgatttgttcttgcgtaggaatcttactatctgttggattagtaaacttagaatatggtatcccataatatccagagcttcttactgcactttctcgtggtaagcttctttgtgctgatcccactggtgcaatcattgaagaaaggtctggaccgccagaaggtaatgcataaggaactctttcgttaccaataatttggtatgacatagctggtctgtgagttactggatcgagttctggaacaacaccaccactatcatcaaaagccagatcttggtaaaccgtttgaccactcgtaagagttgaatcaccaataccaaaatcacctaccatttgatagttaccattaggatcttttatttccattctagaaagaccattattaatggctactctgaattgctccggtgctatacgtccctctccattttcagaatctattgattcattagcaattcttcttgcttgagcaatagaaattccaataggttgcgcaagctgttggttatatgaagccacacgttgatttgcacgtccaaaggctgtagaagcacctgcacttagtctacctagtccaccgctcattccacttgaaagtgatgagtcaaaccagttatcaacattgaagatactttcagattgtgcagctgtacgagctacagctgcattatgagcagcccttgtttcataattcatacgatcatatgcttttctttgcctatcaaaatatgattgtacatctgaactagtagcaactttagatggatcaggactgtatctactataatcagtatttctaatattttcatagtcctttgcagcaggctccccaccaagtaaagattgttgatttagagctgcttgttctgctaattcgtgatacatgttttggttgattgtaggggtagaaagtccagtttgaggatcaatacttatattattgaacaaaggcttcgcttgtactgaaccaacttgagacttaatcccagcaattgctgatgaatcaactccaattgatttgagtctactttcaagagcattactaaaccttgacttatctacccaactatttttaaagctttcatttcctgtttttggatcagccaaatccccccatgtttgattaaagttttgtttgctatccatagcagatagaacttgttcgttgtttccagcattcattaattgctgacgagtatgttctttgaatgaatccatatgttgtttatacttttctggatcattctttgacaactgttgcattctacttgtcttactataatcttcagcttgttgctttacttgttcattaatcttttgaggatcatatggaattacttgatcatttggagacgttgcacctgcaatatcagcagcttcttgagcggcgaatattgccttttgtcccgttctatttaagaatgcattagcatctgaaactgaaacttcgtttccagaatttgccatatcttgcttccactctttatatgtattagacaagcccattgctttagctttagcgtctagctctgcttcattctggggcttaccatgtcttccatcataagttgtcccagaaagtctggcaagtgagtcgttaatcttcgattgtaagtctttgactttactataatccccatttgttccatgaatagcactagctacgtatgcatctttttctttgtccgtcatactattccaatgattagcccattgtttcatcttttgagcatttggagaatttacactttcaccagttttcttagcgtaactttgagctgctatatcagcatccccacttgcagcatcattaagcattttctttaggtcttgttctcgacctttagtctgtgccttttttattgcttcagcctgttgtttagcaaaagcagtattgccgtatttctgcttatttaagcctagttttgcaaaggcacgacctgctaatgctgcagctttctcaccgattttaccgcctgctttagcctgtaagattttgccaacagcttctggagcatcagcgcctaatgcaccagcggctgcaatagcttgagcgccttgttcaccaactttaccattccatttctgcactatgtcatttaagtgctttgcagaaaaggcgtgagggttatttgccgaattcttataggcgtttttcatagccttaactcgattcttcaagcctttagtatttttggcagctttaagcccttcacctaaggctttatatgttccagcattacctaaagtatctaaacctgctttaccaagaatagacgcagtaggaccaagtgcagctaaagctaaagctgaaccaccaacaagtgctgcagttttaagagcattagaagttgactggtgaataccgtccaacatgtgcgtttgtagtccaaaaagttcagcaagacctcttgatattggcaagaatgagatcatgatgatccagccaacaactaatacttcaaagtttcctgcaccaacacttggagtttggacattgaatactttacgaaaaccagctgcaactattccacctaataaaccagaattacttagaatgttattggcaaaggtagtaactgggtgtgcaagattatagttttcttggtgagcaatagcagttgcagtttgcagagtaattctagaattattccacgaactaaacatggcaaggtaacaaatggtaagtgcttgtacactttggataaaaatagtcgaaaccatttcatgtagccaattccacgctctacgcttaccccaatcagatgcccaaaatgcaataaagattggacctacactaattaagatagtaaaggcaattgctcttataaagtagtaatacttgatatagactgctaaacctactgcagtaaataagtaaaccagtgagaagaacgcaccactaaagttcactcctaaaataccgcccgatgttagtgcctttagcgtggaattaccgaaacctaagtgaattgcttccgtaaatacattattgccttgtacttgaattgattgcatgaaaccttgcaaataaagcaagatcacaccgtttagctgcaacaaagtagtaactattgctggataagcaactagaccaacagatgacataactgtatcaatgatgttgtgccaaaattgcgatcttgactgagcattattcatgataattccccacgcaaaacggatacctgcgatcatgagaattattatcaataagaaaagagccaattgcattgagtttggttccatccaattagatacagcatacatgttttgagataccgtattaactggatacattaataagtatggtttgttatagactatgtcgtttaattggctagaagtgatagcaccaccaaagatagttgcaccaattgtgttcttctcaagccattcgcctactgaggttgaccagaagaaattaaaaatagcttgagcaattttaccagctaatgaagtaggttcttgttgcttaccactttgaagctgtttttctacatcttttgcagttaccccttcacgattatttatctttttagtctcttttctgattgagctgttatgcgctctaaagtacttaccagctttagatttcgcaggtgctatttcgtaaatggctttttctttcgtactataatacttgtcgctacccttatcaggattgccatgtttcttaatatattcatctactttagcctgttgtgatttagttaaaagcttatatgaagtatttacataattttcatacttattccaagctttttcatggtcttctgcggcttgtttagttttacttagttggttttgatcagacttattctgtttataagtttgcttattcttttttagaagagctttatatacagcagaagcaagattcttatagctgtcatatttatttgaatctatattgacttctttagcataaaaatctaggtctttcttatcactatcactaagggtgtccttatcaagcattttcttaactcgatcagtttctacactttgccccttaggattaatttggtcaattgcagaattaatactacccctagcccaattgccccagtctcccagtttatccatgccgtaagcaaaataattatttatcttaccatgcttgtcaatggcattagagtatcgttcactgacagtaggctgagctgaatggtatcctgcaaatcctacaactgttggaataatcaaataaataccaagacataatacgaacgtggctaatgctaaactaataatcttttttaaatcaaaaagagagtgctttatttcaaaatcagatttagttctgtagtcttgctttgatctagctctcatctcttttaacccctttcttaagtcggctaatcattactgcatagcctgttccagctcatcaataaagtctccatttttacgttctttaccaacaagaggattagattccgcaaagtcccagtccccttcatcaatgttggttctgatcttaatattctctccttcttcacgaagaataccttcaccacgatcagggtgagaggtaaggaattcaagcgcaccctcgtttaaatccatagtttcctgcatcaacttagcgtgttggggcttaatcatcagcaagaacataaattccgagttggttactaaagattgtgcctgctcattaccgttaaatctggcaatatcttgagtaagccaagtcaatgaaccattccgcttacgatcacgtcttacgattctttcaaagaacgcaaacatttttggactatcaataaactgcaaaatttcatcggcatccagaactttatgaactaaagccttatctgggttgttcatccattgttcccacaagtaagtcataactacaaaatatgctacttctttcaaagaaccatctaggctcttcaaattgaaattaacgtatttatagtcattaagcgtggtagacatgttttcaccaaaattagtttgaccatcgaataatggctcagtaccagttgttaagaacggctgcaaagcatcaagcacacgacttacattaggatcttgttcaccatatgttttcaatttggcgtataaatcgcttaaagttggctctcttttaggaatacgtgagtagaactttctgccaacatatcctgatctatcctgaaatagagaatctggattggtagtaatacctaagtcgtcttttacaatagtttgcattgccttaataattctttgacgttctgaaattcttaagccaccttctgtttcactaccactgcttgagataataacgtctacaaagtcggcaacgttgttaatcattgcattaacattagcttttttaacgtacttgctaccgtcatcatgagtgacaatcttaatattaggatcgctaagcaaaagcttttcttcaagttcatcagttgttaactgcttaccgttagaatagtttgattgctcttcttcaataggtgtttcagtagtagtaattgcgcatggattaattacgaagtgagaatctggaactaggttaatattcaagccacctaatttttgcgctaatggaacatattcaccgtctggatcaatagaacggtgttcccagcccattaatgaaacttcacgggctatcttaaccttgttagcagttgacttacccgaacctgcttcaccaataattccgcaattataatttgctggacggtgatattttgtgccaaaaatgtttaaaaattcagtattggctgatggtgtatcaaggttattaccaaatggaatgccaccgttaaagcgtccctcagcgtttctggcaatatcaattatgcttaaggcacgtctattaacattacggtaagtatcatctaggttcctcattctgatacccattggcagagtttgaagatatcccgatttaactctcttggtatatggaactacagacatttgtgcattacccaaaatatcttcgacattctcccagttcttttccaagtctttctggctcttaccgtaaacaataaagctgattgagagatcatattctcggtcttcgtcaacctgaatttgatccaataagtttctaatatcgttgtatttaatgacagtatctcttaattgattagcttgcccttgttgttcttggaacaaagcatttgaacgaatagttgttaacatattggacaatgatttaatagattcacgtcttgaacgtgggacaatatccaaagtaacatcaacgttcttttcattaagcaacttttggaatacttgcgtctgcaagtttgttggataacctgttgggggtacataccccgccattccataagttctgtgtgccattgactctctcatgacaaattgttcctgcataagatcatctgttgaccaataagctggagctattacttgaatcaatgatggctgtcctaaaacagtagaaggcgtattgtgttgctcattataagcgtctacgtccttttgcttaaacgattcagcaccgttgtgatagatattacctattgacttgtaattatcaccatagaccttattttcatccctctggtcgttatcaccgctataaccatcatcataatcatcttgataatcttgattatcttgaggttgttgtgattgagcgtggtttacattgacatagcgcttttcatttttaggagtgcttgttgcctgctgtgactgttgagatggcgttgggggttgttggggctgaacctgcggttgtggctgcggattagactgatattgctgttgaggttgtggctgtggctgagaataacgatggttagattgatcaaattgcggatcagactgtccttgatagtagctatcaggattatcatcgtagtcataatcgtcaccatcgtcatactcatcaccatcatcagtgtaatcatcgtagtcataatcgttgtaatcgtcataaacattattatttgatttcttttttctcttcttcaaaccaaacatattgtttccagccccctaaatctttacttgtccgtcttgattttcacgatcaacaggacttctataataatcttcgccttttttgatcttctcttggttttctttttgttgttgcttccaaagacttgaagccacagtttcagtagcttctgtttcgactttgatacgttgttgaacctctttaaagtcttgatcagtcttaagtgcagaaacaaaaagcgagaatctttgtgatttaacaatatcctcaaaacttacttttacagatgattctctgttgaaagtcttataaagcaattcaagcaagccgtattcttgaagttctgacaaagagtgatctgctcttctcaaaagactgtctgcattagcaatttgacgatagttcttttcatatgccttcttttgaacagcttcttcaagcttggcaggagtatcaccataaacttcatctggctgtacggtacacatgaattggacgtaagtatggttttcaaaacgatcattttgtttttgataatcaagagttgattcaataatgtacttaccatattccttcatttgaggagttaagcccttaagtacatccatatgcttagagagcctattcagataatcagttaagtcgaccctttgactaagagaagaaatcttaactggattcatcagcgtattaagccaaacttccatcattacttggtcttggtgtacttctgcatcagatttcaagaaaggattggattgttgcatttcagcaacactaacaaacaatcttgagttgtccccagtttcaaattcaagcatcccgttatgaatattgattaatccaatttccttcatgaaagattcaaaagaagaccattgatcataaatcaagtcgggatcattgataggctgagtaagaggattgtcttgttcatcctgtccgtcatagtcttgtccgttttgattatcagattgctgtggcaagggattaccgtttctatctcttggagtcatatcgaaatcttgctttcggttatagcgcaaaagatagatgactaaggcaatgacaataacgataactgcaaaacctgttagccaaattatcaaaatctttcatcctttcttgttctttaacaaaatagtcaaccttatcaagggttgactacaaattaataacgtcttctgtttctggatctaccacggttattctttcttttaccttcaagtgaagtacctaaaactgtatttgctaaagcattccagaaaccataatcgtgagctttcatactgaatttgcccggctttagatagccgataacgactgcgagaaatgctaaagtagtacaaataaagacaaatacgctagtatgtgcgtcaaccacttcatcaatgacaaagataatgtataagatcgccgcaaaagtaaggaacaacggcttattgtctaaaatgctcttatgcttacgattaagtctttgcttagaatttctattatttccgtagttattcattttctattacttacacctttcaaaataatcatctgtacttaggaatgtaggtcttatcgtgatttacagggtggttatgaggtacataattgatatatgtacctacttcttcggaagcataatgatcaattagcaattgtttgtaacggtaataaaggatattgccgtttttgtctctaataggtttaaaagcaaaccaagcagctggagctatgagcagaatagctactgctaaacctgccaagattgagacaccagtaccagcacccataaacttaaatagcttttctaccagttgaaagaaaaccattcctaaaaatgcggcagaaccaacaatggcaacctgcgtccaagaagcaagtcccaaaaccttcttttggtctccgcttaagttaacaattaagacagctctgtttggatcatccatagccctagccccctgctgccaaatgaactatttgtctggcatgaattattacgaatcctgccacaatgatacctatcaagtctcttaaagcttcctgtctacctcgtgcatccccgaaagcagaagcatatccaattcttgtaccgatccatacagtacctaaaaccagagatacagagccaaagccttgtaagaagacagcaaaaccgttgagccagtcgttaatctgattaagaccaccgacaccacctttaggggcttgaagctgaaagttgttgtttaagtttgtagaagtagttccgcctgagccactagctccgccttttgtttctgcatatacaatcattgggcttaaaaatgtaaatttaaaaagcacaaaataaaacagaatggcgatatttaaactaaaaagcttataaaacttgatagctttattttttaaatgtttaagcttcatatttattcaccatttttgcctaccacacccacccttacttatctatcaatgacttgttaattaataccagctgccatacctacaatttgttgcgcatggataacaacgataccagcgataacaatgtagactagacctctaatagcttctgcacggctacgtgggtcttgagtaatagcagatgcaccaatttgaaaaccacagataacgccaaacagtactaaacaagcggcagcgaaaccttgaactgttggaataaatccataaatcagcttaggaaggctttctacaccgctcttgccactgctaggtgcatacttttcaaattcttctttaccctctttttgaacttgtgcaggagttttacctgcagcaaatactaccgaaggcataaataaggttgaaaagaatgaatacaagatactaaaattaacgccaattaagacagcttttttatgaaagcctttcttaattcctgctaagaaaccagtcattttttaacctctctttatctgaaaaattcactgatcactatgtttgatgaaaaataaaatacccgaaaaagcttttatttttcatagtagatattagtgaaatgccacctgaacctgcatgatttctctgaaatatagaaaatgaaaaatcaaataaccatgaactttttttgctttagaaaagctgaaagctcactatcagataaaatttcacatttcacgtttccattaggctctaagacatgagagccatcttcattaaggtagaaatatactttctcgcttgaatccattggatatatatctggatattgcattaagatttttctttctaacctttgatccgctctttttaagaacatttttatcaccagtctttaactaatttcataataagaaatgtaattcatttgtcacaaacagggatatatttcaaaaaaagtgcaaaaataaaagccgttagttttaaaccaatgtcattaagttaaggcattgacaaatgaagctagactttttatgaatcgaatcatttggattcggttcttttttttgcaaaaataaaggcgaaaagacctgccttttcgcctgctcattaaaattttaaaccttcaaaattattaccagaaagttggtgttaattatgaaagcccttcataagaatattttagagcgtcttgatcagattatcaataatactggggaacatattcatgattttatcgataattcacatgcttttaccagaaaacgcactttagatgcagctacagttcttaaaactacgattaatatgcaaggtcaaaatctaaccagcgaattatttagagcgtttggcaaaaaggcagctaaaagcaatgccaaagtggttagtacttccgcttacgttcaacgcaaaagtcaactttctcccgcttgttttaagcatattttgactgtttttaatcaagatctatttaatattcaacttcttgatcataaatatcgcttatttgccgttgatggttcagattttaaccagatatggaatcctaagtcaaagaatattgttcaatcttcaactcataaaaacaaaccctattgtcagattcatgttaatgccttgtatgatttgttagataacacttatcaagattgtgtttttcagcccaaatcagagatggatgaacgtaaagccgctgtacaaatgcttgaaaaattgaattgcggtccatatatcgtaacgatggatcgtggttatacgagttttaatatggttgaaaactgtaatcgtctaccaaattgtcattatgttattcgaaccaaagcgagttgcggcggaattagagaagtagctgcactgccagatcaggagtgcgatactgatatttcttgtaaagtaactacttctaattactactacattacgcataaagatagtgaaaatcttcatcatgtccagcatcattatcaccaatatattaagtatcgttctaaaaacacccaggatttaaactgggattttagcacgttctgtacaataaaatttcgtgcttgtaaatttaaaattaatgattccaaatcagataaagaagtgtgggaagttgttctgactaatcttgatcggaaaaattacccgctacacagaattaaagagctttatcatttgcgttggggtattgagacctccttcaagaaacttaagtattctttaggcagcgtggagtttcattctaagcaagataaatttattgagatggaaatttatgctcatatgatcatgtttaacgcaatcagccaaatagatgctcaagcctatattccacaaaggcattgcaagcaccaatatgccatcaactttaagcaatcatgctttattattcaaagcatgtatcttaattcttctttatctgagacttttgaaagaattttgattcaagtcagccattacacaattccgatcagaccaggacgaaaagataaaagaaatattaaacctaaatcagctgtatattatttatatcgcgtagcttaaaatataaaatctgttctaagccttatttgtcgtacaaaaaaacaccaatttaacaaatcaaatgttaaatcagtgctttaaaaggttagtctcagttgtcaatgtcttaacttaatgacattggttttaaactagcgactttttaattgtttagaaattatctaaaaacgtaggaatgtaatttaccttgatttcagttttgagcttattaatatttggctctttggctgggatgatatttgaaccccaatttgagatatagccttcaagctttggaatacgtacttcatcaaacttgcttttagacggtacccactctttttcccaagaagatttatggtttaccttatcaatttttccatagttataataattgattatctgcttatttggcttaaaagcggtttttccgtctgcatacttaaagaacacaatctgtgtaactatctttaaacgcttaatctttgaatagttatgttctaagtgaatttcataatcattattatctgctttgaaattctgattcttaaaatcattagactttactacatatccaagaccttgtagatgtttaacctcatcttcaatatcatatgggaattgaatacgagtacctgtctttccatatacctcttgataatcaacgtttttgttgtctacatcatctttaacagttaacgttgctttcattgttttagccctataaactactgtcttttcaatgacttctatttgttcgtttgcaaaatcttctggttttagagcaattctctgtttagggatgctcattatatcagcttggtaccctgcaacatttggagaaagaacaggcggaaatactttagctggaatattagtatcccaaacaatatctttatcattggctttcttaacgccaaactgattgaaacgcaaagttgcagtataagcatccatgatttcagaaccgtcttcatatacataatgaattatttctttaattgtctttgctctttgataattctgagtttcagtttgtttcagcatcccttttcctgttttctttttgaagaaatcccaaagcaaaatctaatgtttccaaattgaaatagattctatgatcataaatatatgtggggtgcattccattctgcgcaattactcttcttaatttatctacagattgctcagcttgaagtgcataatcctgtattgttgagatttgatcttttaccttttgatagccgtattccgataatcgctttactccagactgattattcttaaagacaagcattttagaaatttcttcttctatgctcttgtcgtaccagctatttttagcctttccgcaagctttgacttggggatgaaattcatgaatatatctaataatgtcatcgttagatacgttctttaagtctttttcaatatcaaatattctgactaagcctaattcataacacttacgcttccagttctggtattgataatctttaatcagctttttagccttgaggaatttcttcttagaataaaagcgattaagaccatcagcagaaacatatgatggagaaagatgattgtcatttagaattttgagaatctctttatcaggtatttcaggcaccaagtctaaaatagttttcattgagtagatcatatcatctggatcagcatgtacgttttcgttgtaagtcaacatttttattaccctgttctttatacaaattgccaagataaagccaagttcaacaaaaaaagctcataaagctttatctcaagctttatgagcaattatacgatcaaatagaaatacaaaattttaacttttaaaagataaaaatgagttagaaagtacagaatataaatccaaaaataataattgcagcaaatatgcctaaacccggaccaatattatctggatctgtgttgtaatcattttgatgtaagttatacataataaaatctctcctttacttgataatttattctcttaatttcaattttcaatttatattttagaaacatttctaagccaaaacgaaaaaatgacaaaaaagtccaaaaaaatctaaaaaagtttttcaatgaaatttgcccaagaatccccgtattttaatgcggggagggatagggcttcttttgttgcttttttggttcctatttctgcgcttctccctttttcctttatacttattaatgaaaagaggtgaaaatcatggctagaaaaaacaaaatggagttctgctttgcagtccgtatgcgcatgttccccagccacaggcaggaacaggttctttggaagaaccttaacgcttcacgctttatctataatcagctcttggctaacagctataccgacagtgctattaataagttgaacaagctttatccgattcccaaaaattgttggaagtaccgcacagtcaagggcaaaaaggtagttatcgctaagtccaagaagagagcggtcggcttagaccggattactgccgacaggtatccgtggctgggcgataaagaactcgacagcatgatgttctttaatactgaactgcattaccattccgcttggcagatgttccgcaaggtacacagaagcggtgtgccaaagttcaagcgcaaggacagatcggtgcaaagctacagcacttctgctataaagcaaaaaggagctaccctttacgctaagtcttcgataaggttccttgaccatagccacctgcaactgcctaaaattggcaggatcaaggtgaagctcaccagacctttgcccgataacaatgcggtaattactacggcaacggtcaagcacttttcagacggcacttggtttgtttccttagtgctaagaagcaatcaaccgtttgttaaagaattaccgctggctaccaacccccatcgggatcgaccttaatctcaccgagtttctggtagattctaacggtaataaggttgacaatcccagatactaccgcaaaagccgtaagcacttggctagactgcaacataagctggcaatcaaatacaggcgtgccaagaaggaaaagcgtaatctgcgtgactgcaagaactatcagaagctccggcaaaaggtggcatcattacacaagcatgtgcttaatcagaggaataactttacccatgtcctctcaaccgcactggtcaagaaccacgacctcgtagttgcagagaacctgcaaggcaaaaatatgattaagaaccatgccctagcaatgagcatcagcgatgcaggctggcgtgcttttctaacccagatggagtacaaggctaagctttacggcaagacttttgtcgaaattgaccctaagtacactacccagcgctgtcacgcctgcggacagatcaagaaaggcaaagaccgtatcagattgtcgggcaataaagcccatcagaccgatcactttacctatatctgttacaacaaggactgtcccttatacatgcaaaagcaggatcgtgacgtgaatgcgtcaaagaatatattagacaagggctacagtgccctgctcggcttcgccagtcctaagacgaagattatccgataaacaataggacagggcgtttggcaactcacgtccttaacggttttggtaattgattgtaagccgtttttgggaactgcaatggctttggtatcgttgcatttgctgaaagcgcagatcgtatctaaacaagttgtgtctagtaggttaaaggcgatgaacctttagccgaagtatgcaagccccagaattaattctggggtagttgacgacaaaaaaagatcaatccgcaaaagcagattgatcttttttatctaacaataaagttctttacgtctagctttttgttgttgattcccataacagagaagttgctcaacaaatacgttagacaaaacatgaaaacatcctgcaataagtcattgtaattgacgaatgacttattctgcagatcattaaacattctaatgccttcatctttcattgtagatacggaaacataaaacttatcataaacacaatatcctaaagttctattgccactaagcaagcccaacatgaatgaatcaaagtaaaacttataattactattcgttaaggatttgcctgcctcatttttaaacttagtattcaacttatcaataagatatgctttaccaattacatcgtaatagctgaaaagaaggcacgaatatgaacgtcttttttgaaaaagaccatcaaaaatatagctatccttatcatctatcaacagaatatacattaatcctttctgacctttacccttaggaacaccaataacacatttaagcttcatcttgattttcagtttggttaaaagagattcttgctgcttttctggcaaaaagaaactttgcgataagcattcttccttctcttctgatgtatcataaaagcctgtatcaatatatttagcaagcattcttactgaacgcatgcacgtatcttttgaccagctattttcattctgcagtaaatatgccgtctttccaaacagaatatgttgagaataactgtttttctttaaatatactgccttaggcttcttgatatctccctcagtatttactggtgtttcatcaactttgggttgttcgtacttatcagtgtcaaaaaggtctatttgaacatatttaacttcaccattcataaaacataactcctttgaaaaacaaaaaagaatccaaagtcttaaaatcaagtcttaaaacaatgaattcttaatcctctataaaaataagtaatttaatgatatttcttgtgctattttgctaaaaaactgcttgtcttcttctgccctattaactaatacttcatattctgatttatcagattctttagtttgatctgcagcccaaatttctggatcaaaatcttcaacatgatctttaaatttggtagctatttgcttatacaaatattcttttcgttcattttctgaaaagttattagttacgggtgcaggaaatatatttacgtttatggtttttacaccaaacttgtttttaaatacaagacctgcgaaaacagagcctgtgccattggcaaatcctaaaaatgtaggatgtgtattatccaactcgtacttattgccaactttcttccaaatatctctaataaagcttctatctttatcagagaaacaagccagcttatctgcatgattatctggataatctggaacaatgtgttgcatgtacaaattttgagctaatgtaattagctggttctcatccttatgccaagcacgcaaaatttcggcatgattcaaatgattcttaataagaaaacctgtgtaattcacttcttgccagtcatacataccgattattctaaaaatcatactgtacaactgttttgccagataatctaaatcatcttgactactacaatgtagaaacatatcttctccgcctaaaatgacatcgactgtaagtccgctttctgcaataacagaaaattgaactttatccatgtttgcagtggaaacatctttccaatttccaacgacacccgttggaaaatagtgatcatgtagaagttgaaaatcatctacatatttattaagcaattctctattctgaaaagaaaagactccttgcttttccatagccaattcgatttcagggttttcttcattaattggctcatctgaatcaacaaaactatccttaatttttttaattcctttagaaatcagattattcaatataaaacactcctacctattaaacaaattacgtatgtgaatcaaacaaatcacataattaaaacaaaacaaaaaagcattcgctcttttaatggaacaaacactttgaaaaacactataatttgcaaaaaccatctgcaaaattagcaacaatctaaaactataagatcaaaaaattcaattaaatcaccttacaagcccgagtttatagggcttaaaaaattttttcaattattctgacaaatttgtcatttttttgttttacctctaaaaaagtcctatagttaacaatgtaagttgattaaacaaatcggtaaacgaaaaggagaaagaattatgaaaaagaatttgtttaagagttcagcagttttacttagtggagttgttttattaggtgttggtagtttagctcctactcaaaaagtagatgcagctgcaagaagttacattactgttgttaagaagtctaaggtttataaccgtaagggtcacttcactggtaaatacattcatgtcggcaaccctgaaactaaatacggtacagttacaattaagggaaagaaatactacaagatttctggcaatagatacatcagagccgttaatgcaaaatctggtaagaaagttgttttgaagcatcttgctaatgtttacgacaagaacggtaaaatcaatcacgacttcaagatggctaagggtactaagatgactgttaaatcattcattaatattaacggtcatagatattacaagattggtaagaaccaatacattaaagctaccgacttccaaattattggtaactacgctccagttatctcaaacaacaatactacttcaaacgcaagcaataatactaatgtttcaaatactaacaatagcaacactagtgcttcatcaaatatttcaagcaatggtactactgcttcaaccactcaaccagtaattaataatgggtcacaaaatcaaacaagtggcaatacacaagtacaaccaaccattccagttcaaccaactactccagcacaagaccacaataacaatgctggtactactaccaatcctaaccaaggctcacaaactaagccagtaaatccaacacaaccaactactccagcacaaactcataacaatactggtactactaccaatcctaaccaagattctcaaactaaaacagtaaatccaacacaaccaactactccagcacaaactcataacaatgctggtactactaccaaccctaaccaagattctcaaactaaacctagtggcaatgctggtgcttctgtttctggtgacacacctactactaagccaagcaagcctagccaaggctctcaaactaaacctaacaagaatactgatcaaaacacctttagattgccagctaactacagagtaggtattgattcaaatcaatgggaagctcaatcagaaaaaggtaatgctatgaacaattacaaagctaacttggctgatcaaaatcaagctgtcaacccagataaattgacttcttcacaacaacaagaacttagtgaatttgcacaaaatatctataattccgcacgttcacaattaggtttaaacaacgttgaatacaacgctaaaacacaagaattagctaaccgtattgcagataattaccgtcaagcaaattgggatgcctttgacaacttacactatgtaaaaggtatcgtagaagcacaaaagagcatgggcattaatagcaacgtaaatagtgttgaagatatttatgttgaaagtgggtctgctcaaaacatgaacgacttgaaggaacttacttataatggtattaagtcattcttctttattaacagtgaacaagaacacgctaaagacatggttgaacctagcttaaagtcaatggctgtttctatcagtactcaagacaatggttcagacattgctatgcacctaattactgtttcaagcaaatacaacttctaataagaaaaaataggacaaaaaaggacgatttcaaaaatcgtcctttttttatgctcagaagcaaatgctaactagtctaatccagttgcatggtttctgcttacaaacaatacataactaccaacaatgcttacaaagatcacagcaataccagctgccatcccccagtcattacgactgttgccagtttgtggtaatacagtttctttatgagttggtgagttattggtaattggagctactgaaccattgccaccattattagcaacaggtgtaggaattgccttcttcttagttactgaaacagtttgagcagtatcatttaagttatcgtgtttagcaatttcttgttgaatatctgcattgcctgtggttggagcattcttttcattggtgttggtaaataattcttcaacagcaactaatgaatgtccgcttaagttcttgccattaaaggtgaacttcaagttaacagtaccatttgccttctcagctttaaatgttgcagtagcagttacaaccttaccgctttgagttaaagtcataccagtcttttgatcagctaacttcccctttacagtataagtacgccccggaattaagccttcgtatcttacgttatcagtaagagtagtatgatcagaagcttctaatactttttgaccacctttagttaaagtagtgtgaaggtcaggctttaagacgttaacagtttgagctgcagaattaatgtcttcgtgttcagctacagttgcaccagaagtttggttgccagtgtaaagcttttcaaatacgacaagtttcttaccaccgtagtttgaagcatcaaattggaatggaacttgaacactgccgttacttgaagaagccttaaatgtcattttactttgaacatcttgaccattttcttgaacaggctttccagtttccttatccattaaagtaccaacaacagtgtaggtatcgcccggaattaagccagaatattctaccttgtcattaacagtagcaatttgacccggaagcaaatctttagctccgttatcagtcgtagcggtagtagttaatgctggagtagtaaagcctacagtttctaattggtcgtttacatcttcatgtttgatagtagtatcttgaccatttgacttgccagctacatcagtaaatgcgacaaccttcttatccttgaattgtgatacatcaggaatagttaacttaacatcagtgctaccagttgtatcagttgcggtgtaagttgcgttaccagtgatttgttgaccattgctttcaattgccttgccagttgaagcgtcaactaaccaagtagtaactttgtaggtttcgcccttttccaagttattcatagcaacattttcattgagtgttactgaacctttggtttgttgaataacttgttcattagtatcagcatcagttaacttagtagctacagtaacagaagcgccttgttgtggagttggtgccttaggacttggcttagttacttctaaaatttcaccattgctagtagttacatttggcgtattagtcttagaaccaacatgacttctcttacttggaataacgtcattagtaaataatgcttgtggtgaagatggagtattgttatcttcaaagccagcatcagttggtgcagcaggaatatctacaggtgaaccagttgttacttcagtattagttggtgttggtggagtctttttaccagtaacactggcagttgccttcaagtacttcttgttaaatactgcttcaggttggttacctgccttagtagtgtaaatgtgaccactaacaatttcaccaccagtagctacagcagttaatttcttaccgttggtaggaattactgaaccgttcttgtagtacttgccgttaaccatggcacccttggcaccagttacgtgtaaagtagcattcttaccagctgagtctaatgacaacttaacagttggcttagctgctgccttagcttgagctctcttagctgcaccaatattcttttcaatatagttgtacaacttttgagcattcttgctgtgccagttgatgttcttattaatggtaccagatgctttccacatagctacgtgtgttgcagcttgtgcttcaccactggttaagcccttaatatgagctttctttgcaagttccttggtagtgttgttaccaaaaccaatacgtgcaattgcgttagcagtagcactagttgacttacctctgtggtatttttgaccagttacaggtgacaacttaggtgcgttgtaacaataacctctactcttaccaatgtgagctgaggtagtatcgctaattgccattccgtggctgtgaacagttacgtaactctttgaactgccactgtgatgtgcagtagcggtcttaccagtagatttagttaagtgtccagtaccgctcttccctttagcagatacattagcacctgcttcaaagaaaatcggcaaagccatagctaatgatgaaaaaatcttcaagctacgatgtggatttacatcgtcaaacttcttttgagccgaagttctatcagcttttctcatatgtatcgctcttttctttaacaaataaaataatatttttcatcggtttagccccgacacgtaaatattacttttgcattacaatctatatgtgtcttatttttaaataaaaaaaaggagaacgtaaattaaacaatgtcattaagttaagacattgacaaattatcgacttggacttttaagatcattcatttgcgatttatcgcatttgaatgctcttttttcatgccaaataaacccaaatcttgtttagaaattaggctacacgatataaataatatacagctgatttgggtttgagatttcttttgtcttttcgtcctggtctgatcggaattgtgtaatgactaatttgaataagaatctttttaaagatttcagttgaagaagaaattatatacatagcctggatgacaaaacatgactgtttgaaattgatcgcatattgatacttgcattttttttgtggtacatatgcttgagcatcaatttgactgactgcgttaaacataatcatgtgggcatagatctccatttcaataaatctatcctgcttggaatgaaactgtacgctacctaaagcatatttcaactttttgaatgaagtttcaatgccccagcgcaaatggtagatttctttgatcctttttaagggataatcggctctatttagattagttagaacaacttcccattcttctttgcctgatttaggatcattaattctaaatttacaggcacgaaattttattgtacataactctccaaagtcccagctgccatctttggtatttttagaccgatattttatatattgacggtaatgatggttaaccaaatgaacgttttctgtagccttatgggtttcataataataattagaggtagtcacccagcaagctatatccttatcacactcttgattaggcaactcagctacttccttaaatgcgccatatcccgttttagtacgtatgacataataacagttaggcaggcgattacaattttcaatcatgttaaagccggtataacctcgatccatagtaactatatatggtccgcaatttagctttttaagcatttgaacggcggctttacgttcatccatctttgacttaggctgaaagatgcagtcttgataagtattatttaacaggtcatagagtgcattaacatgaatttggcaatatggctttcctttatgattgagatttccaacgatattctctgatttaggattccagatttgattaaaatcagacccatcaatggcaaatatacgatatttatgatcaaataactggatattaaataaattctgattaaatacagttagaatatgcttaaaacatgcgggtgaaagctgacctttgcgttggacataagcggaagtactgactactttatcgttatttttaatagctttttggccaaaagctctaaacaactcactggtcaaatcttttccttgcatattaatagtagttttaatgactgtagctgcatctaaaaaccgcttcctagtgaaggcatgaggatcatcgataaaatcatgaatatgctttccagtatcattgataatttgatcaagacgatctaaaatatttctgtgaagggctttcataattaacaccagctttctggcaataattttgaaggtttaataatttaatcagagggcgaaaaggtaggttcttttcgcctttattttatgcaaaaaaagaaccaaatcataatgattcggttctacagagattagattcaatttgtcaatgtcttaacttaatgacattggtaaattaaaacgttctcccttttttgtctctgaataaaaaatcaactaccccagaatcaattctggggtagttgacctagaaaaagcattccctatagtgaaataaatcaatcacttgtaaggaatgcttcttagcttatttatctattttgggcttcatgttcttattatttaaaatcttggacatccaatcaaattcacccatgtctatttggcaaccataataagtatcatcaaagaataaatggttcttattattactatctaaagttgcctcataatcaacttcatcatagaaataacttaagtagcattgttccttgaatacatcttctacttgatatatgtccagcttgtccttatttttgatattatttaagacttccctatcatgcttaacaatatcatctaattctttctgtgtatgaatataatagttgctttctaattcttctgaatcaggtgatccgaggaaatacatatcactaaccaaatgctttagtagcatatctgcataagcttttacgctttttccaatagtaaatcttgaatctcttactttttcattgctatcagggatagcacttgtattaacttctgcgtatgcttgtactgtataatcttcagcgggtaagtccaaaagctttatgtgtttatagtcggttgcaatcggttctccatgctcatctaaactagaaatttctcgttcagaggaaccaatatataagtctacagagataaattggtttaattgaatcttctgcttgtacttctcaaaagacgttattccatttttagatgcatctttgaaagcaactaacattaaacttcgacattgctttctaaatttagcaaaatcaaattgcaaataaagtgcaaggtgtaaaaagtatttatgtaattcttcaaaagttaaattcagttcatcctcaatgtcaaatacgtgccattccttaattttgccaaaactatcatcgtaggcaacagtacataaatatgctttattgccttgattatcatgcaaaatgatacgatagttaggtagaccttgatattctaatttcattttttgcctccatattgaatcccatgatcgaaatatgaaatgaaagattattttgaattattttttagtgaaaatgctgctaaagaaattgataacatcttgaactattttttgaaatagatttctattttctggcgtatttactttatcgtacaatttcttagcatctttttgaaaactgtttgataattgactggcttgttctttgaagttgctgttctttaaggcacctgaatcacgaactgattccaagaccttgatgatttgttgcttttggttattgttaacagtattgcctaagtgattaatcttaatttgattgttaacaatttgaccaatttggctatctgagatgttttgaccttgttgagccatttctttcttagcacctgcaacagcattgtttaattgaacgtcactgtaaccttttttgtctttattttgttgtgtaataccacttaaagtattcatttcatcttgagcggcatttacttgtttttgattaagagcattacctccgtttttagtataagaagcatatacacctgctaaagcaccagaaccatcaattctagtagcactagttacatagatattagcatctgaaatacctgcagtaatagcagcgttcttatattgattttccgtaattgtagtaatgttgttttgaccttggtaattaagaatatgaacattaataccagtgcctttaggttgtttttgaatcattgcacttgaccatacaccagatgatgtaatgaagttatcacctgatgggtttaagtatttaaccagatcattaccagttacagtgatagtttgatagctttgaccatttaaaggctgagttaaaactttaatagtattttgacgctgacttgctgttagtgatttacctaaagtaactactggtaaatctgactcactagaatcagaatcagcattagcagttttagcatttaagtcaagtgttgcaattaaaaaagccaaaaacacagcgaatactgtgttcaatttttttagtttcatttctaaaaactccttaaagatttcaaaagcattatcagaaacaaaatttcattgatatccaattagattttctgaaaacggctttgatttatttttcaattatgattgtagcgtctatttcaacttataaataaaaactggcaaattaaaaaaattggtttccaaaaaagcagaagcctttcgacttctgcttaggagaatatacaagaacataatgaagaataaatttaagctcaaacagtagaaaacttagcgctttcgtttgcgtggtgtatgccaaattctaaagagcagaattgccataatcaatgcccaaacagtagcaccaattaatctaatacgcttaagagataggttttgaacgctcttcgcaatgcccttgggttgtactgtaggacgagcatgagaatgatgaaccttatctgttaactcaaactgctcaagatttgcttgtgttgcaggatacgtctttatcaaaacaccttgtgcaactgttctgtgctgaccatatccgtaaagcttggtattaaagtctgaacaagtaattaaagtgatcattcccagattattgtgattgtgttctacttcaatttgtgttggcttgatatcatatgccaaagatttttctttatattcataaatcttggttagatcagtcacataaattaaatcgttcttatgagttaagtgtagattatcaagaacagccccaccacttactgcggctgaacccatatagtgacctgctagaacataattatttttgccacccatttgacggtttggcaccaccgtacatacaccataactaagattttgcatttgtgaaccataaccttcaaatacaggattatgaatatttacagatggaatagacattcttccaattggtgaagcaggatactttcttgatcgccacagttcttgagctgaaatagaagtcgtctttctagcatcatatgatgtctttttcttcttattctccttaactttttctgcagtcaatccttgcgatacattagctgcattttcttttacgtggtatgcattaccagtttcggtattatcaaaccaaatcacaacaccaaatgcggcaattaaacctaaaaacaggataataattgaattaaatatcttatttttgatcacttttgctctgcttacataatgtttgggtggcatcccttgtggtggaacattatttcgattgtaattcatattgggattgtttctaaaattacgattagcatcattgccgttattgggacggtactgcacaaattctgggttattgaaccctgcatccctattgttagggcgattttgaggatcagaattataattattatttcttctcatgttttttactgctcttttctacaatttcagaatcaatatcatccctcaattcgggatgctccttatagaactctttaagatacatttctctatagggaataaattggcgaccatatttaatggtgaccgttaatattccaactattagagcatatgcaaaaacacagtaattaattatcaacaatttagggatgaatttcttaattaagaaaaaagaagataaagctaaaagaaaagtaagaacagccgattctttcagatcatcaaatcgctcatcataagatgtatccatgatgaagtctcttagtttcttccacataagaccaactcttctctaaaaaaattgcatgacatattgaataagccctaacactgcacctaatacaattgcaagtgcagcaaaaccaaaggcaaatccgtaaaagtgtgatttatgatacattagcgactaatccctccagatagagtcattaagattcctgcaaagatgacactaaaaatcaaatatttgaatgagtcataggctttatttttagcatcgggcgaagatactatatcatccatttccaaagcctgcataccttgtacgtataaaaccgtagggaccatgtagagcattatttgactgccaacgaaaaatgctataggaatcaagcgatgaaagaaattatgataagacattgcactagctacacctaagtgacctaagacaatgccaatatatcctaacttagcaaaactgaaaccaatgctacgcaaattatggtttgagttacttacacttaaagcaataatgaacatgcttataacaatcatgatgatacagaacatatcaatatcgtagataatgttatgagcaaaattgatagtgctttgagacggaatatatttaaattgataaggctttacgtctttaaaagcgttggaataatcaaacttaggcgtgttttgaatctgcctgctgatatcttctgagcctttagatacaaccaaaaacaagttattcatctaaaaccaccttttctttcttcaagatataagcattgtttgaatttgctaaatatctagtaatagtagcgtcattatgaataggatagtcattgctgtttaaatctaatccctcagaagtatcatcgctctcttgagcattagtgatttctaaaatagcaccgactgcctttccttttttggttgtaaagccaagttgcttaattttatagctcttgtctaagttatcttgaacatgttgaatattgtcgatagcacgagctaaatcctcatgactgaatgatttagccaaagtatgctttacaagcttaatagccctgtgttcagtatccatatcaagctttaaggcaatgcaattgcgccagccttggaacggttgaacaattatattgtcaaatacggctttatccaataaatttctaaagttatccgtcttttcgagtgttaaaggaattttaggctgaatttctataggcgtttgagcaagatatagttcaaaacttgattcaaaaagatatggcttagtttctttaaatactacattgcctaatctagcttccttgaaaagatcaacagcttggttgatatgagaaagcaataatgcaatatcttctgctaagaaacccttttgaaattctaccttttgcttcatgcgaatattggagaaaagaaattggaaattagatctctgcattagtgagaaagtgcatttaatgcttggctcatattgagctaaatatggcttggcactattttgaagttcctctaccttgtcaaagaagcgcttagaaaagtattgctccttaaacgtttcactagggatgtcatttccaaatacaatgtcaaagtacttaaattgaccgtctttaatataaaagtcggcagtttcagctgaacagataaagcctgcctttgcttccaaaagcggaatcttaccgcataccgttctgaaacagctctttaagctttgatctttaggtacgagaaatctaatactgatctttagtgttttgcccttaataccaagttcatcaatacctgcagatacctttacttgctcaggcttgaaattgtcataaacttcattaacaaattccaattccttttgaaatttaaagcttataggctctatcaaagtatctgaaagctcggtacgttgattttggttatcaatctgggcttctagcttaggacaaatagcaccttttttgaatgtcatactgatactagaaattgcatgattagttttcttagtataagtagctagtgtaattaatctcatttttatagtatcgtctatcataatttttcccctacaaaaaaaacagctatttcttaaaaatagctgtttttctagtacaacgatttcagattacacaaagaaggctagctcgcaactgaatcaacacgatgcagctgtccgtcctttttaatataagatacgttgttagcatgaaccctctcacaaagatcaggatgcttttctttccaacgatcccatgcttctggaccaagatctgcaaggtattcttcttttctttgtttccagtccttgaagtaactcatcttaaatttgttccaacgatcacttttaattccaaagtaatctttgatgctttgatcattgaatcccttaagctgacaaacaatgaatgtatcacggttaatgtcacgtgtaagaggatcaataatttcagatttctttggaaagtaattgctgatacgttgtgacgtatctgaacgcattaagactacttgccagtaaggtacgcctgcaatagtatcgtcattcattaatacgtgactgcgcaaacgcaaaattggtttgcatacagggcactcattacaatactttacatgttctcccaatttttcaccggacgacaaaacatagttatcaaggatttcaagagcctgcttcttaccttgactttgacgagcttctaaactattccttaccaagtctctatcctctccccttgtaaacaatagaggtgtattaatcgacatttagcaaatattaaccataaagattatatatttctagtttgaagaattgcaaggcaattgtcactgtcaaggcaatgtgtaacatttgtgtaaaacaactattattttattcttgttaacgtcttcgatccatattgtaaataaatctttttataagtctttaagttctttagattgctgaatttgatcttgagatcagcaggctgtgagttatctactttagatggcgcaccgtctgtcgcactctcaacatcccctttagtaccgtctctttcaataccgactaacttatacttggtaaagtcattcttaattgaaaatacgtcacttaaagaaacgctgatgcttaaagtatcgttagaccatgaaatcttacctttgccccactgcattgaactatcattgagttcatctggctgtgcttggaagactgatgaataatctgtcgcattgttcatagccagctcaattggatatggcgtagcagaggttgaaaagtaattatcatcattgtcactatcactactgctattatcatcagacaaaagctttacttgatatggagcattgctcttggatagctttgactccagcggaactacaacggttgtagacttaccatgaagcaggtctatttgaaaactgctgtagtctgatgcaactttcgtttcttcccctgatgagtctacaaactctaaattgttcaagttaaaagtgaaatcagtattagtttcatttaataccttgattaacacggttgatggatctttataagaaaccaccatccatgtacgcaagtgatcatacttagaatcgttaaattcatctttcaaagaattaacgctatcagtgtttcctccactagaagagttattttccttctgctcttttaagtaattcttcatattttgataatatgagctgattgtattttcggatgatgaatcatctccactgtcgttgccaagtattgaattaagctttgaagctgaaacatttgaagcaacgtgttctactccatcatcagtggtataaatcattttcattcgtgaaatgtccgcatttgatagccgacctcccacataaaagctgattacgtttgaccagttgtctcctgaattcatgttaacgtgaaagtcattagcttctcccggaacatgtaatagctttaccctgtttccgtcaatatcaaggctaaaattcttagatactaaagtcatatcttgcttgcctgaattgctaatgattactggagcgctgatgatacctgcagattgatctacatcaccaaaatagaacttaaatgaactattattagatacttgctttgtggttgactgtgactgtgtcttaggggatgcaccacctattctttggcatcccgtaagtaaaacagataacagcattaccatgcataagataacaaacgcatttaagctattgctctttctgactatcattgttctcactgctcttttgatctttcttcaacaaattatcaaactttaattggcacaattcgttcttatctccttgtggtaagaagaaagcattttgaatgccctttgttttaataaatgttccgatcaaaaagattgaagtaaagttccagttagccaaattaagctgttgactaaggttattaccgcattccaatgttggacagtagaaagccaatatatttttaccagctggtaagtctgcaacaggacgtgtaaagttttgtccctcatcagtgaatttagaccacttggtaacaacgtcttgataataactaatactgtctgtttgcaaacatgtgtaaaatactaggttttccaatgtattaggaatcaattctattgatatctgcaaaggagatggaaccaatggaatatcttgcttaggataaccattaaacatagttgtgtagcctttaaaggctggcaaggtagacagtacttggtaaacatcacaggtttcccagaatctaacatgaaatagtggattaagtctgtagaagttttgtggttggaagtacttttggtctccccagaaagtctccaaaaatctgaaaccattaactgtaagagtaaagacgtgaatatttttattaacgattgggtggaaatacttccacttttgaataagtcctaatctctgcagtttattcaatgaagaccacatttgaaacttactgaaaattccactgcttaaatgagtttgattaatcagttgcaatgattgaactgatttaaaccgagcaataaatttaagccaatagaagtctctttgatccatttgttggaagacatttaagtattgatcggcaatttcatatgttctaatacgatgaactgaatcagatagaacaatatagccgttcatgtagaagtctcgcttaatttcaaagttgtcttcgtcttctggtctaatcaaagatggcatataggttctgccgtctttttgtacaaaatcaactttgtcaaaatcaacatgaggaatttctaatttttgttgttcaaagttgagttctggctcagtcttttcgggatttcgttctggttcagcattattttgtgtttcagccttttcttctaattcaggttcttcaacgtttggctcagcttctgaattattaacttgatctacagtatttggcttgttcacactatcttgttgatctgaattaggctgattaaattctgggtgaactggcatttcaaagtcgttcattctatcaccttctacttttgatcaatgtcgtagttttgatccatcactgaatcaacgcttggagctgctacgccttgagggaatgaatgaatatatgcttgacctgtatgtttttcaaaatcaatacgattaattcttactgttacgagagtatgatgaatttgatcttgaatagtaggcttataaattgaatttgcaggaaggaatcctttaatccaccaaccgggagcaatttccactaaaatacccttcacagaatcatatctagcaatacgagctgagaaccatgctctttgttcatataacttctttacttcttcatcataatttggaataaatggcaaactggttgtctcgatgaagtagcgtgtaccgcttggcaactcaatgtgactcaaattttcatcattcttaactgatgtcatatcttcataagtcgtttttgtgatattgctgattctaaacttaaagctcttgccaatgtatgcgtctctggtaattggatgagttaatgaacgttggtggaagtttcgttcaagcatccctaaagtgatgcccctgtagttaaacatgacaatacttaatctattggcaacaactactctagatacaacaccaactctgtccttgttcttagcttcttctggatccttttggaactcgtcataaagttctttaccaacgatttgttctgcgttagtaattgaacccatggcaatataatgttgtccctttttttgcttattattaacatcatcaaagctaataaacttagtaataagaatcttaatatcttgatcaataaagttttccaaatgacggaagctcgtaccaccatcagtgattggaatatatacaggcgcatcgttagaatccattcgcataagaagcattggtatatgctttttacctaaagtataagtggaaactgcaacaccgtgcgcatttactaagtccttttcagtagccttctctggagaaccataattacgcttaatttcagctaacttgctgatttggtctctggttaattgttcagcggctttcacaaacaaagggtaagttaccttgtcccgtgcatctgcatcaaggacttcttgcaattcttgttcattttcgttcatagttaaaacaaactcctttacaacaaaaatatataaaaaatttcaaatttcttttcgtatgtaaaagctaatttatttgcttataaaagagttggtttatttttaaaatctaaaaatgaactattatgttaagttttttctaacaaattgatatattttatatcatctgctataaatctttgaaacagacaatcatgcctagtcataccgctcgctactaggacacgactaatcgtgccctttggcaaactataggcattcaagccagttttctccgatttattgaaaaagcttttttagaagtggggcgaccatttccgtgggtgtaacacgcacccgattatctgcttggaatcgcttctgtcgcagaatacttggttcttagtcattatctgcaaggcaccgttgacatccgcattgattaaatagccttgatttgatctaaaaagccctcttttaatgcgtctgttgataggcgatttgccctgctctttgcgtgaggagttgccgttgttccagcagggcttttcgttatccaaaaagctagtctggctggtatagctttccggctgggtaactacttcgatgccgtagcggtttaccttataggttagaatctgcactacacggtagtgcggaatgccgataaagttctggttgttcttcttgccaatattcgagcgttgcttccagtatttattgcgcccaatgatgatcctttcggctccacagctaatcgcatatgcaatgatgcggtctgttgccttgtggatggctgaaaggattttttgattgcgccattgggtcagtctgctgtaggctctgccagtgtgatagacaacttgagtagtactgtctttcttatgaacggcaacgcctttctgcttgtacttggtggcaagctcttgcagttttgctttgcgcttgttgtagaaatggttgacggacttgatccccttgccgttgatgatcagcggatttacctgccagttgttagtagccagcgtcattaggttgtctactccggggtctccggcaactacgatgccggcttttctttgaggaacatccttgcctttgtacttggtaagcttctcttgcgagactacataagtaacgcagagcttgacaccgccaatgatcggcttgagccagtaggtacggatgcgctgtcttctggcaagctgatccagccactcgtcattactcgttcggctatcatcaagcgcttgttgcaagtagggtgatattctcacttttaaatctgccttgtcgtaaaccagataattgcccttaagcttgatcgtctgcgtatcaagttcggtcgagtgacgcttgcccttgcgcaaatacttagggaacttcggcttgcctaaatatttgtagggatattttttgtaatcgctaaggcttttatagtagttagaccagtttctttttacgtccttgaccacgctgttactgattttgatattgatacagtcccggtaaagggtattctgcccttcaagcgactgctttttcaatagtctggttagttcggtagcggtgtagtccttgccgtactttggcttttctttcagctttccgactttgtacaggtgcaagtcgtacttgtactgtctgatattcttgaaatgcctttgacggaacaggtagttagcctcgttatagcagttgttggaccacttgagcaggttatccagcttggtattgccgtaaatatagtaggtgtcaaccagcgtggttagatgtgccatgatttctttcatcttttgtctggcttcctgctgtttcgacatgcttttcctcctctccgatttcttttcctaaattctgccttgacgaataggcacgcatggcgaagcagtggagcagagagatgatctcctcgaacagctcctctttgtccgtcttggggttaagctcgtcatctactacttcaatctgcgtatcaaaattgttaaacaaatgctcgaacatattgaaggctactcgtgacaagcggtctttatgcgtgataatgattctttctaccttgccagcagtgaccagatcaagcatcttgaagaactgcgtgcgatggttaaaggtcaagccggagccgatctcgctaaattcgtaatcgacttcgtagcccttgttaaccgcaaactgcttcaactcttctttctgatgagccaagtcgtgcttctgatggtaggtagacacacgactgtaggttagggtcaagcgatgcttgaagttcttgttcatcattctaaaaacatcgtctgcgttgtagtcgaactgcttagacggtcttttgactgctcgcaggtagccatgctctcggtaccgctttaaagtaggacgactaatctgtaataattctaaaactcttcctgctttcatattgtctcctttctatctaatattatatcaaattataaagaaacagggcaaaaaagatggcaaatacaagaaaaaatatctcgtatttgccattatgttattgtttctgataataaaacttaactatacctaatttggggtgaatatcatgcaacttaaaataataaattaaagtgcttatattataaatatatttcccttgcaacataaaattaatgtgctaaactaataaatgaaaagactaattaataattcataggaggaaaattatgaaaaaagatacattagtattcactaacgatttaggatacggtaaagacaaaggtagttttgaatacaagagctttgtacagccatcagtaatttcagaggttattcaaagcggattggatcctgttgacgcagacaatgaagaagctgttaagaataccgttgataatctgcttaatgaactagatgtaactatcaactcaaaaggcttcaatgatgcagaaaacaatcaaaaggaattcttagtcggaaatgcggcaagcacttctactttacgtaagcaaacttttgatgtttttaagctagaaaagaaatacaatactgatatggcattaatcttgcctttaagtattgcagctgctaaggtcgtacaaaaggcgtatgcagaaggcaaagatattttcaagggcttatctgcagatattgatttgttcactgccctacctattactcaattaggcacaagagatacaagtgaaaagatcaagagcgcctatgctgaaagatttacaacggataatcacgttgtacaaattaatactttcaacaagacaatttcagttactcttacctttaacaaagtttatgtgttaaaggaaggtgaaattgcaactgtcttagctatcaagtatggacctgatgaattaaaacaagccattatggaggatgtaaagaagaataatcctaccagaattgacgatgcaaaggagttaatcgaaaatcctcaaaatgttctaggtattgatattggtcaaggaactactgattgtccattaattatgaatggcaagaccaatattgatgcttcaaatactatttcattcggctatgggcaagtccttgaaaatggttatcgttacttcaataagatgagtgatagttttaatgttggtactctttcagaatttgacgatattttaaactctgattctgaaaataaaaacgacattgcaaaccaaaagattgtgcaaaaagcagttaacgcttcaattccagatttgaattctgaaattagtcgtgaattaagtcaaattttgcacctagacccaagcttaaaagtaattttcgttttcggtggcggttcaattccattgatggaacaaaccaacctaagaaaagaattacaaaaggatttagacgattacagatcatcagctctacttatttgggtaggcgaaaaatatgctcctattctaaataatttagggctagaaatttacgctaaagtaattgaaggtcaaaagaaacaaaattaagttttttagtaaggattgattaatatggcaaacaaagattttaaatatttcggttttagatttattgttggatctccaattgataaatggctacaaaagcaggataatcaaatattttcactgtccttaatggcaaaaatgatgcaaaaagagttcggcagcgtagacctatgcaaagccattacagataaaaatattgctaaggtaaaatttgttgatggtaaatttgtttatgaaaacaaccagccaactattccaattgataagaaaaccaagaacaagactccattagtccaatacaaacaaaagtcctttagaatggacgacaaagattttattagttgggttgatcatcaaaagatcaacaaaaccagatcaatctatatcagtattaatttgatgatcaagagttttggttatcatgatcttagccaaattctttcaccatcaaatacagatattttagcttctggaattgacagtgaagatcctgaagaatcagctaatctttcaatgcctattaataaggcaaaatcaactaaagcaaagcctaaggctaaaaaggtagctaaacctaagaatgatgctccaaaaactgatgcagataccaattctaacaagtctgaatcacaaataatggatgaaataagcaataatctaaaaaacgcagatataagtgaccttaatcaatctatgaaaaacttagacctttaaacataaaaaactaattttgatacaaaaaaagacaagcaacttaatagttgcctgtcttttttgctttaccatgtatcttgatcattttcgtcttcttttaacgaacttaaatctgatgactcatgttgtggctttctttcattagccttatttgcttttctttgggctttattatttctctttttcctaattttttgacctaacatttctaagccttgcatagcttccgcatccaattctttttgccttttttcatcttcgtctgtctgattactttcttgatgctgaataacattggaagatctattttcttttggcaaattgtcatatacagcttgtttgtttggctgtactctgtttgaaccattaacttggatttgagaaatattttgagggctatttatactttgaagaattgtagcatgaactctacgatatagtgcttcggtaaagttttcaccaccaaaattgtgtttaacataatttattaaaaaattcatgcttgctactgtatcattctgtgcattttgccaatttctaatatcatcgtccttctttccaagacgaatcttaactaaaatcggattttgctttgaagatactgaatttgatttattattgtttgctccagaatgtaaagcaacattactacgcaatgaaaagtggtctgcttggctaagaatatctacattgccccacattactattgcaaagcgaattacttcttttagcgatccagacatgttggtttggttttccagccaatctttatttgacgcataaagccgtattgtcgtagcctttttctttttcataggtgtgtttcaccttcaattaactattcttataaagaacatgaagcaaggttgttagtccttccatatttagaatttgagcgtatttcttatcaactaccataattgcaggtgatccgtactttggacgaatattatgcaaagcagtttgtaatctagggacaaaatcatctggcataatatttgctccaccacctaaaattacaattaaattcaatttatatttggacttggtataaattgtaactacacgattaataatacttgcttccagctgctctaattgaacgtctaaggcttgcttagcatctacgtgttctgcatcatcatcattaatagctaaatctacaaattcatgtctatttatatcttgataggctgagtttgttttggcaaatgactttgcagctagagttgcagcggtgccaattccttgatagatgcttcccgtgtattcattgtttacagaatcaataccgttcataactgaaaattcagttgatccatcaccaatgtcaattaaaagatctctgcctaaagtctttaatacagatataccattctcaattacaggatggttatatttcttatatacatcatcaatatcatcatcataataaatattattgaaaaactcttttttgcgtgcatgttcggttgaatcccaaattaaagcgtattgagcaactgtaccttcgctgtaaatatcgactgactggaaggcaacatttactcttactggtttaggtaaattgttaattacgattgtatgtataccattagtaaaacgatctacatatctttcttgcgcacctttaatttcatattcagaaatgggaagagcagtaaccatattatcaacgctaacattgatttcttttggcaatttatcggttgcatcaaagtatttctttacgcttgagtaagcaattaaagttagaatattgattagtccaatatcagatgtagcctttccttccattgagttaacattgtattcttctttagccatagtggaatcaacagcagcttcgcccactaagtagcgtccttggcgattaagagaatcactgtaaatcgtaacatccatgtttttagtaaagcgattcatagaatgtactaattcttcgtgtctgtttacaggaaatggatgagaagttgtattatcaaagttaggatctgaaattgcagccataacatcagggatcaaatatcgcttcccgttgatagaatcaccagagtcatttggataaccaataaagtctttagaataaccgttgcctgagtcatgagctactaaaagatgcaaatttcttagttgagaatcggcttcggtatcttcatacatcatagaaagtcctcctcgcattcttttattaattacagagttattatacttaaagcctttagcatttaatcatttacaatttttcttcaaaaataatgttctaaagcctaaaactcaaaaagaatttagattgaaaatgacatattcatgaaatctaagttctttttttggtgctcttctctgtgattaaaattatttgtagcaagttgagaatttaacattgataaactctaaaactaattagcaaaactaaaaaagcaaatttttacatggaatgtttaatgtttgatttaagcgaaaatggagagaaatatgcgttttttgtcacaaaaaactttagatcaataccaaagatcaaagctctttaatttgatccataactatcatccgctagtcactgatgaaccacctatgattgttaagcggttctacacacctgaggaaaaaaagcaaagagaaatggctcaaaatcaacaaagaggtaataatatgagatcaactaatcaaaggaagaatttaagaagacgctcaatggaagatgccacagatcatcgcccacaaaataataatttcaacaacaatttcaatactggtaataatcaaccgccagttagccaaagtacccaaatgggggatgctttaagcgaatttatgagtagtaataacaatgttatggataataatcctaatgccttaaataatgcagataacagtggcttccaaaaaatgaacagtttgccagaaccggtagacaaacctatgaatccacgtccagctatgaacaacaatggcggctcatttaatcaacctaatacaaataactggcaaaaccaaaacagcccacaattgcctgcgccagaaccacaagggcaggtccaccaacctcaacaaaatatgccaaacaacaaatatccaaataccggatttaatcaaggctataaccaagattacaatcaaaacttcaatcaacagcaaccacaggcaaaattcaatactcctaatactaatactgaacaagccaatgggacaccaaacatgccccaacaaaacatacataatgctcctcagcaacaaccagagccagagcctaaacaacctgctcaaatgccagaaccacagccacaggaaactcaagctcctactcctacccctcagcctgaaatccagccacaagagacagaagcacctgctcctcaacctcaagaggacaaaactaccagcgatacagttgtacctgcagataattcaaaagaatttgcggaagatgatgaaacttatcaaagaattacctcagcaattaagacaagagattttgttgagcgtatgaaccaaattgaaattgcattgaatactaatcttaagaatcttccatgcaagcgacttaatctgattatgcttcaaaatggtgctattcaaaaagttaacggtagcatccctcacgaccagaaattccatatgactcttgaaagtggcttattcttccagtcatttagtcgtgtagtaattggtaaatacatggatatttcattaattccacgtgttaccgtcaataaccaaaccaaaccagtaaagaacttaaacatttgtcctgaatcttggactaaggacaacaagtataaagatttgattattcaaggtaattatcaatactgctactacaacactgatatggagaagtttattgaatcgcttaagagatttactttcgatgtgatggatttaggtactgcaaagatctttgaattgttacaaattcctgtaatgccagactaaagcaataataatcaaataaaaaagagatgagcttaaaaagttcatcccgaattataaaacataattaaacctgatttattaattagcttcgatcacgttttactctctctatcttttgctagagagatttttttaagcgttaagctcggtgggtacggttgaactcagctcggttaatattacaattaccctattcctaggggctggctttgatctgccccaccttgaaggtgctacgattctggtttttctttagcctaggaacataccctagctctaagaatgggcttaaagcccgttgcgacatgtcctcagcttagctgataaaaggagaagcattccgcctctcgctttgtggcagtcgacttatttaatatattttttaactggcaattctttgatcaagaattgcctttacttttttatatggcgtataaagcgtgatttctttatctgtggctcttgctaggatattctttgacgctgcgatattacagtccatttctccgcaattaggacataaggtcttttcattatgcttgccaaatcttacggtaaagtgctgtccgcaattagggcagtattgagaagtataagcaggattaacgtctttaaagtcaatgccatactgctggcaataatactctaaacgttcatttaatactcccttagtccatgaggacaggtttcttctagcttggcgttcgtatttattgcctgtcttgtttgctttgtccttagtgaaggtcaaatcttctttaacaattaagcttggatgttcagtgacaatcaatgctttaatggcatggttgattttgctttcaaggcaggcgtgataagatgcgtggcgcttatctttgcgcttataaccaatattattagcgttcagcttgtttaattgactagctaattgctttttcttgataatttgtttaggtgtattggcgttttttagtcgattaagctttttctttaattgatagcgataaccgtaataaggattgcgtctagctaagtattggctttcttgctcaattttaggtctagtaaactggctaaaatctttgccgtattcacgaccactactgcaagatactagcgtggcaagccctttatcaataccaagtttagtgtctgcctgatagtcctgcttttgtctaactttaatgaccttatgaatttcaatccgctttttatcacgatctaagatgagttgtaaatcgccttttaagcgataatgccacggactggttaagacaaaagtgaatttcttgcgcgaaactcctgaagaaatggtaacttgctctaattcgtcaccttgaaaatgatacatattttcatcataagtcattgccttgtttaagcgataatgcttgcgaggagtgtatttataccatctagttaatcttcttaaatatgaataagcgtgtttccgctgttttggcgtaacagcctcttctaattctgttagatgtttttgtaatttttgagataaatctaaaagtactgcttgatcgttggttaaggcataataccacaactctctaatggaaagcagatagtagatcaagtgtcgttcatctttatctattgaatcatttgcttgcacgactttacgaagttggttggctaaattactccacatagaattgatattggcacaagcatcacgcaaagcgtatttccagtgcttttgcaagaagtgatatttttctacataaatgttgccttgcttagttttaaccaaatggttgcgcaaactgaaatactgcttcacattaagcatgtggttaatgccacagtattgatttaaaaacatattgcgacatttgccatagctaacaaataactgatccagtttggcatatgtttcctcatcaagcttaagcgaataagctctaatggtcttggaataactctcggttcgttttgataatcttttcattgtggtggcttctcttcccataaagcttagcagaataaacggtaatcactgaaagcacatctttaatcaattcttcattggagctttcagctttagtctgattaattacggttaattcaacatcatgttcttggcaaatatctttaatcaaatcaaagccaaatctcactaagcgatcttgataattgactactacttgactgcattgctcagtgcagattaagtgaattaattcttttaagccttttttattgtaattaagcccagaaccaatatcagaaatgatcttaaaagacttgccttgcatttcacaaaagtgggttactacagcttcttgacgcttcaaatcgtctttttgatggctagaagacacacgacaatagccaagtatcagtttggcaggactagctaatgaagtaggctttttacctgctaaagtggcatcgagcatttctactgtgtagcgtctttgattaccagcagttctagtcggcttaattttgccttcacgctcccatactcttaaagtgttaggcgtggtatttaaatattctgcggcttgactaatagttaaatatttaggtagtgttttttctgccataaaaaaatctccttaagtttccttaaggagattatataattataattagctttaatcaagtgtattaatacttatacattaagaatcagcatttaagcaaactgctggtagcccttttttgttggaaacatatcttggtatttaagttagacccttaaacatattgtccttgcttttagcattctgattattcatctgacgcataaaatcatctgcgatctctttatcgctcttatcacggtcaacagtatcatcaaaactatcatatcttgatgtagaactctgttttacttcatttgataatttctgttgcaattcttgagacttcttgcttgattcttctgcctttgcttgaaaactgttaacctgcttatgcacgttcttaactgctaatgtagcggttcttagactattagagagcttatcaatctgctggagaattagattatcctctttagaaatattccctaattttttgatagcctgctcaatccgttcaagcgtttctttactctcaggggatgcatggcttgtttgaacaatcgaagcttctttttctgattcttgattttcaagattagtccgttcaaccaagatagatgctggaaacttcttttgattaatcttgccagtctccctatttacgctaactaataccaaactgcctttaacaaagctgatgtatacgccagtgaaatcagaataaggcgtagtatcaatcatactagacaaagcattgattgagaatttgttcttctgaataaagtcaaaattctttctagccatccatgccataaatgtcttttgatcggatagctgcattgacgagaagaaattctcgcattgctcagcttcatatccataaagtgacttgtctagttcagaaagagtaattgtcttgatttgcggtgcttccttatcaacgttaattaccgattgatctaaagattgcaaaaagtcattaggagtttctgaatccataaaacagtctaattctttacagtgggcgctgaaaagagaaagtaatttaaaatacgttgagtgcgtcaatatgcttgctgggaaccaaataagctttttctggtcaatccaaggcgataatgctttatgcctgccccttttggaaacaaaaggtaaagcaaaacgtttatgaatgtgccaaagaaaattaatcgcactgtttagttttgaagatatttcacctttaccgctcttttgaatagcttcaattaaattttgatcgctcttatctgaaaagtatttacttgtcttatctatcttctttatgctttcatcatgtgttttagaattgcttagttttgccaaaacaattaaggcaccttctggcttatcgtttgattccaccagcaagatttttagcaataaggtcaataaagttttagaaacaagtccattcttttggctctcgctttgaatacgattaagggtgatatatgaagcaagaagagcattaaatctatcgggattctttaaattatcagttgtcaaaagcaactcattgtcaatatctctgtaatagacataattgtcgccactaaaggtttttaaagcttcctgcgtatattcactgttaagcgccaaaacacctgcagaagctctatttgactgtattccacacattaagcgctgagatagcgaactggtaattggagggtcaataatcaaattcttaacaggcattgctactcatcttcattcatcccgtgctggtgcataaactgatctccttgatcggcaaaatcaggatcggttttagcattcttaatagtcttgtttctgctcaaatcagtatcatagttaggatcaggcaatgaatccatcatatcggtcaattgatcataaatgctggagttatggctcatgtcgttcatcttcttgtcaaagtcatttccgttgccgtcaagagtaattgtaccgtccgcaagatccttcttaagaagactaatagtattatcaagcttctttaacatagtaggtgcttcatctggatcaattaatggcaatgttttagcatatttatccttaagatcgcttaacttatcaatctgcgcacctttagacaaactgccgtcatccaaaatagagtgaatcttatcttcaaaatcactgcggtagtttgagcgtactttagtaatattaggtttattttcttcacgaattttacgaagatattctggatcttctttatcttcataaagcttgttgtttctaatatgaagcatgtcattatcttctttcttttcgtctggtttcttggcaacattaggcaaatgctgatagccgttaggaagatttacttctgtttcttgagcgggagctggattttgcactcttggcttaatcttcaccgtttttaccttcttaggctcggttttctgctcattaataggttctgttgcttcaatctgcttagctggttgcgttggctgggttggttgaacagtatcttcctcaacattaggtttattggcatcagaagcaaagtcttcaatgacctgctgatcctgctctttttgctttcttaattgctcaataaatggatctttcgccttgcctactttatcggtatagcggtttgtaccagcatgatttttgccctctggattaataccctgtgaagcatactctctagccttttcaacatctattgaagcaggaacagttgtttgagttggctcttttgtttctttaggctgactcattggcttaaacggatcaacacttgaagtcttattatcagaatcattgcccttagttgtgtcttgggcttcttttctatcatccatgacagcgaatgctgaactatcttgctcatctgtgtcatttgaagcaggtacatcttttgaaaaaaatttgtctaaagcagaagaacctgtcattccactaagggtaacaccagtagaagcattcggctctttatttgtagctttccccactgttccatctgtacttatagggatgcttacgacctctgaattttcagcttgagaatcagatgaatctggatttggcttatcttggctactattaagattcaaatttctcatagcttgaatctgatcctcatttgcaccgttaagagctgtactgctgccatttttcttcttaggtgagtcttttgaatcatctttatttggtgaggaaaccttataagcatctaaatcattattcagcttatttttcttagctgactggcttgatgtactgtcttcttgaataagatcatcatatttaccttccaaatattctttatgaatttcagtatcaataccttggaagtcagggttgttatgtacttggtgctgaatcataaacatgtagtcatacctatcattaggatcagataggtcaaagttatttggatcggattcaatatccttatcggttaagaacttcgttctgacacgattgaacaattgtgaaccacgtaattttgcagggttaggtgttcttactgccatagtgtatttttccatacccataagttcttctgcagtgatattaggaacttcttgaatactgctgctaatttgtcgtctatctcgtccaataccagaaagtaaaccagtcactgcatgagaaacattttcgacaatcttttcacgggtaccgaagaattgttcaaacatcttagctgagtttggagacatgttgccgaatacaccaacggtcaaaaggttatcacgtacagtgttagcccacttttcatcgtacttttcagctaattgttctggtgattgacaactcaaaataattggcacgttgtattttctagcctgtgcaataaacttactaaatgacttttgcaagtagtctggaaattcatcaaaatacaatgggaacattggaacggagttgttaggatttctacgcattgtagcatcttgccaaacagtagtataaataccacccaatgtttctgccaatttgggaccaacaacatccttagcagtgttacaaagaacaataccaccgtttgcaaatacatcatcgaagttgaattgaccagaatcatggaataaaactctcattaaaccttggttcttggaaatatcatcaaggatgttgcgtaaaccacgaatatattcatcgttaacatcgtagtacttaggctcgcccttgtgcggaccagaggtttcagtctgtacgctatgattaaattgttcctgaacttgaatattattatcaaaccagtgaagagtagctacagctctgttgtaagtgttctgagcttcatttacatatacgtagcggttagcatgatcaatgactaattggatatcctcttttaattgaggatcagtagtttgttctttttgaacttcaagtttagctatctttgaatcagcgtcaatatccgtactcaaattcttatattgattaaagaacataggatttgcttgagtacgctcttcaatcttttcacttaattcttcgaacttttcttgagcttcatttttctttttatttaagatctcaacataaacacgtaagcgttctcgcttttctacaactagataaacgtcattgtacatttgaatcaacgtatttaatgttggaatttctttagtaataacactatcgaacttcaaaagataaatatagttcttaacgtggttacgtccagcttccgcaaagaagtcttggttggaattggtaatacctacgataaccgaagtaaaactttccgataccttatccataggaccacgcatcatgttaaatcccggtgttcttgggttagagggatcaatccaaacaattttatctgctgggaaacccatattaatagccatattatagacatcacggcaaagatcatcagtggtttctacaacacctaaaccattcaagtaagtatgagcaatattgccctcagctgttaaaaagcctgcttgcttagagatcttgggataatcacgaatccagcaaattgcatactgaatatcttggtggatttgatagtcaaaaacagtcttagtcttaccagaaccgataggaccatagtaaatactattctgtcgtcttgaagccagaccttgataaacatcatcgccgtcttcttcaatggattgtccgataaccataattggctcatgagtcaactctttctgcttctccttagtagcaccagatagcatagatttaagattcttattgtgatattcctttcttgctaaggctttatcaatacgttcttgatcacgattgtatttttctctgtctacttcaaatagtgcaaaagcataagctaaaggcatggcaatcaagaacaacttaaatatcaagtcattaccgacaatctgtttagcaatggcaggagtccagcctgtaaaggcaggattatccaagaagtattcataaagtgccaaaatagttaaaaggttaggcaggttcaaaatttcacctacagttaaataccgctgtattcgtctggtattgataacctttttcatttctggaactctctgctccgcatattcattgccttttcgtgaaatcagattaagcagaaagtgatttgaacttgaaataagtgcaagattgtaaaaaagtgcgcagaagaaaatggggagtaaaatattccattttagacttggcactggtttaataaacaaaatcagttcaattattgcaaagaagataattaatatccaagctcgcttttgatagagtttaactttgtcgattgcttcgtccaaagtcatactatttaaatcattaaacagcttatcagtaaacggcttgaacttagcttcaaagtgatctactaaatttttcaactccgatgttcctttctaactaacatttagctaagaaaagaataaaaaaagaatgcctttttaagacattcttctttaaaaatctaaaaacaattacaggtttagctgatctttaaaagtgattctttctttgctgacaagcattctagcaaccattgcagaagtcgcaattggttgattatcttttcctatccacgcttcaattaaactagcgttgtccctaattaagtggttggctactgatggcgtgatctttcttgcaagcaacaaattataaatttctttcttaaagtctttaattgcttttgttctgtcgattttttttatcattgctcttatctactttctcttgttgttagagtaagtagacgtttccactttattacttaccttttgatttaggtgtagcaactagcttgatcagaggattttgactataatctttgaactcagatgaaatatcaacgtacagaccgcctacggaatgatttttatggtcgtacatagttacaggagctttgatatttcctcttgtttcttgctcaaacttatcttgcttaaaaaggtttgaaaaatattcaattagattcttcatgaaaaatcctcttttcaaattaactaaataccgatacctgatgtagctaggcttgtaacgataaagattaaaatagtaacccagttcaaagctgtttcaaaaacaatcacccaactccaagttaaataagccgaatcagcaattaagttggcaagatagtttttataatctacagtccagaaaaattcaacaccagtaagaatcaagcaaataatgtacatccaaacacctaaaactgggaattgcaaaacaataaagtttgctacagctaaggctagtgagacaattggtgatttgcgccagtgcataaacttcttaaatgtcggttgcctgttttggtcaagtatctgacgaccattttcatcaagtacataatccgtatcaggattgaaaagataataattaagatcgtccttttgaaccatgccgataattaaaagcactattatgcttattatgtttaaggctgaaaacaggagacttccataggatgctaatagatttgcttggatccaagcttgtgatgatgtcattctacattcctctccttcgtttttttgttacacatataatttaaatctatttttggaaaataaaatttgtcttaaatacagaaaaaacgaccttttgtggtcgatttccttactatttttcgatttaataatacttcttctttttagcaacagctgtaatacctgctgcagcaatcattgatgaagcaatacttcctgcaataatagcattggttctttcactatgatctacacctgtttgtggtagttcactttgtccttgacttgatgaagctgcttgttgtgcttggtctgattgcatgccctgtcctgcattgatattagcattagagttcttatctacattggatgagctatcagtgtctgctttatcttgatctgcagttgaattcttagaatttgaagattgtgaagaattattatttccattcttcttatctttcttatcctgtgaattaattaaatctgtggtatttgtctttgtttcagaagaactagatttagacgtatcacctttagaattagtttttgtatctttcttatcatcttttttatctgaacttgacttgcttgatgtgtccttgctggaatcagttttagaaggatcacttttgacttctgttgacttatccttcgagtctttgcttgaagcagtattgtttgatgtgtttgaacttaatccgtcactcttaatctgcctttgtgtagtggtattagtagctggagttgtcttttttgtaacatcagagtttcctgttgtagctttatttacgggattagttttatctgcagttgaagacctttgagtgttatttactttatcagccatagctggagttgaatttgttggtttactattggcttgatctgaacttgatttatttgaatcagtggcgttagtttgtgcattatcactaactgtattagatttagtggaatcacctgatgcttgtgttgcagttgtggtattatccgctgaagcttgatcattatttgatgttgtagttgtagtagctgcttgatcagattgagcattttcagcattcaaattgttgtctttatctcctgtattacttacagcaccattaatagttgcagtatcatcctttagggatgctgacacagtattcttggttacgtttttattggattgaggctccactgccttaagactagtaagtaattgactgtaaagttgtggacttacatgtccttttcttacttttgaaatgtctagtttgttaactttattatttgatttattagtttgtgcttttgaagtagaagcccctttagatttggttgttttattaacaacgttaagttgaacattagttttcttttcatttgccttatttaattttttagctgattgtactacaggcttaacattattttgactcttcttattacgagtagatgttgccgtattacctttgttttgagaggtattttcaacagtaaacttagttgcacctgtagcggcagaatttaaattagagactctttcatttttaggaacgttagttaggtatcttgatacaaaaccatctgagtcacgatcaatatgcaaaacagcagtacctacctgcttaccgtttctattgtataagcctactttcttggttgtattctttgctgagttggctttactttcaatcttgaccttacgtggatgactcttattgttggattgctcctttgtcacttttggattagattttgtttggattcctttattaaccttcttagtataattagcctttgtagaagcatgtacttggttaccattttgaaaactcaacgtactagagatagctgcagcacctgtagctgttagactaaccatcattactttattaaccttgctcataatctttccccttttcttattaaatttttaccaaataaaagatatgacatattactgttatacgtttcatttacttttgaaaaaaagaagcaattcctgagaattgcttctttaaaaggagatttatttcaaattagtttagtctctttttcttacctgcaacaacaataccagcacctgctactaatgctgtagctacaccacttgcaaggacaattgaattacgtgaatcgcccgtttgtggtaatcgagcttgtgaagcttgaccagatgctacagtaccagcaccaccatttgaaccattgttgctcttagcagcaggttccgcctttgccttattaccattgttgtttgcaactggcttattaccattatcatcagtcttagttacaaatactgaaattggtttgttcttaccatctttttggaaagtatatgtaggaacttcaccacttacatacttataacctgctggaattgagtacttaatcttgccagaggtatcacccggcttacccataataacagtagtcttaactaccttaccagtcttcttgtcaatgtaattaattggaactttaactacatcttcagtacccttggttacatgaacagtaataggttggttatccttgtccttaaaagtgtatgaaggaacttcaccacttacatacttatatccatctggaattgagtagtgaatattgctatcagttgtaccaactttacctgaaaggttatcggtctttactactttgccagttgaatcatcaacgtagttaattggaacactaacagttttggcatctggcgtactattcttagttacgtgaacaacaataggttgattatccttgtccttaaaggtgtatgaaggaacttcaccacttacatacttatatccatctggaattgagtagtgaatattgctatcagttgtaccaactttacctgaaaggttatcggtctttactactttgccagttgaatcatcaacgtagttaattggaacactaacagttttggcatctggcgtactattcttagttacgtgaacaacaataggttgattatccttgtccttaaaggtgtatgaaggaacttcaccacttacatacttatatccatctggaattgagtagtgaatattgctattagtagtaccgacttcgcctgaaagattatcggtctttactactttaccagtggtgtcatcaacataattaattggaactgttgcagtttgcttagcaactgtatttgtcttaacatcaggaatttgtgatggagtagttggattcttaacatcagcacccttatttggagtagctggggtggtattcctatgtgttggtgtagttggcttattaccattattagttggagtggtatgtggtgtactaccattatcatgatttcctgaatctcttggagtggtatctggtgtactaccattatcaattggagtgtaattagtatctggtgtactaccattatcaattggagtgtaattagtatctggagctacaccagtatctacagtttgaccattgtccttaacttcaactacgtgaccagattgagtatcccacgtccaagtacgaccatcggaggtgtgaacagtttgccccttttgaattgtgtagtgatgattattagaatctgttagagattcacccggatgacttccatagtgatcattgtttgaaatgattgttccgttattaagagcgttccactcttcttggtttgagccattattgtatttatgtccagtatgaccagagttgataattacatgtccattcctgtaatatgtagttttatgacggtttttaccatgaccgctccactctacataagtaccactctttgaagccttagctttattgataccatcaataatggttttattcatttttgagtttgttggatcatggtcaacttttgatcttgatgatgaatgtgaaccacctgatgagtgacgtgagcttgagtgtgaaccacctgatgagtgacgtgagcttgagtgtgaaccacctgatgagtgacgtgagcttgagtgtgaaccacctgatgagtgacgtgagcttgagtgtgaaccacctgatgagtgacgtgagcttgagtgtgaaccacctgatgagtgacgtgagcttgagtgtgaaccacctgatgaatgtgatgattttctagtagttttggcatgtacttgattgccattttcaaagcttaaagtgcttgctaaagcagcagcacttactgcagcaacacctgttaaggcaattctttcaatttttgccatttggaaattctccttttttataaataatttaattcatttctgaatgaattttctaacttctaaaaaacgataaataattttgaaccctaagaaataaaaaatactactttgacttcaaaatcaaaaatctttatctgtaccaatcaaagtgaggatcaccattgattgacaccataaagataccctcataataaaatcagcagatatttaatttttaaaataaaaaaaagaaagatgacacagttaaatatgtactgagacgtaaaaagtagacaattaaaatattggattaatagaggcttgacttcgatactctttcggggttaagccttttaatctgctctttatcctttcgttgttatagtattcgatatattcctcgattgcttgagttaattcttgaagattatgatacttgtattcttgatcatagaacatttcagttttgagcaggccaaagaagttctccattagcccatcatccatggagttgccctttctggacatgctttgagtgataccatggagttttaaagctcgctgataacgagggctttgatactgacagccctgatcagtatgaaaaatgcagttattaagagctgtttctttggcaaaagccttgtcaagcattgtcattactaaatccatatctggatgtttggagatagtataagaaactatatcgccaccgcagccgtctagaataggcgataagtaaagcttttcattattaagatgaaattcagtgatatcagtataccattttgtgttaggcagggctgcgaagaaatcacgatgaattaaatttggagctattttgccaatagtacctttatagcttgaatatttgcgcttattgcgcctgatgcctttaagacctaatttatgcatccaatagcgaacggttttctccgtaactttccagccctctctgattaactgcaaagctactctgcgatatccatagcggccttgatgatgattaaaaatctcatggattctagcaataagctttgaccgtttaggcttggcgggctgtcgtttgataatcttgtagtatgagcttctggcaattataggtagctcagggtgctctgcaatcgcagctaatacataatttaaactaactttgaattcttgccttagatccgtaatcaccctagctatttcttctgatcttcttggtccaaggcacttagtttttttacgtattcgttcacaatacgcaatcgcaagttttcttctttcagctgctggatctctttctccagttccttgcgagatttctgcttttctttggtcacgggcagggcgtcctttctgtttgataatgacattatacccgtttttcttatattctctaatccaattgttaagcatgccaatacttttaaaccccagttccaaagacagctgtaagtatggtttattgccaaagattgcttgttcaatagttcgctgcttaaactctttggaatagctttggtttttagtagttaaaatttctattccatgcatatcaattaatctaagcatatagtctaaattagctagattcattctgtacgctttagccaattgactgattgagatattttcatctttccatttatgataaatttctattttttgttctttattaaatttagacatagtaaaagacctaaaagtgtctaacttttaggtctcagttcaatatcctctttctttttatctaatcattaattagattcttttctttttacctgcaatggctaaaccaactcctgcagctaatgctgtagctactccactagctagcattacattagtttcaccactatgttcaacaccagtttgtggtaattgactttgaccgtctgatgatgcagccgcagattgagcttgatctgattttacattgcttgtgccattatcaacacttgggctagacttaacgtctgaatttgaaccattagaatttgatgatttcgtagttcctttagaaattgcattagctacattttcagatgattttgtagcatttctattatcactaacgttacccttaactaactctgacgcaccagtcttaccattagttgaatttgcattagatttatctttattatctgcctttgacttatcagcctttgcagtagttgaagtgtctgactccttcttttcggtagaatctgcgctagtagattgcttatttgaggttgaatcagtgtttgaagtagttgagactgcattgctacccttgttatttgaagcgtttgaagcagttgaaccactattagcatttggatctactgtagaagttgattgtcttgaattattttcagtgtttgaagtagctgaatttgcattgctaccgttgttatttgaatcatttgcagtagttgaaccattattagtatttggatccactgtagaagttgattgtcctgaattattttcagtgtttgaagtagatttattatcagctgtacctttattgttggcatttgagtcattggcagtgtcatttgcaactggtttaactgtaacaagttgttcaaatccagtatcaccaaaacgccaagtcattctgtatgttccaataccattcatagtgcccttagcagctaaatctttgctacctgctgaggtcttagcttgtgttacaaatggtgtatagtcggaatgctgtttaatggttacatcaggtaattctacacggtgagcaacaggtgtattttcatcactagatgaacttgtattattgttacctacattgactgttctggttaatgtataagtttttccatccttgcccttaatagtagttactaatgtttcatcaccttcaccggtgtaaccaattctactaatgttagataatgcattaccattagccttgaagtcaaaaatattattggtgctatcaccactttttactttggctgttgaactaatatttgttgacgtaggagcagttttatcagcccatgggtctgcagatggtgtagctttaacttctactaaagttcctccagtggcattgtttttatctgctttgttggaatcagtattagttgtggaagtagtttggctggcattttgaccacccttatttacatcagtattaattgctggtgtggtttgactagtactttgaccacccttatttacatcagtattagttgctggtgtggtttggttggtactctgaccacctttatttgcatcagtattagttgctggtgtggtttggttggtactttgaccacctttatttgcatcagtattagttgctggtgtggtttggttggtactttgaccacctttatttgtatcagtattagttgctggtgtggtttggttggtactttgaccacctttatttgcatcagtattagttgctggtgtggtttggttggtactttgactacccttgcttgcatcagtattagtcgttgatgtagcttgtgagcctttttttactaaagtaatagtatcgggatattgacttaagtcatgagtatcctttaattcatatccatctggaatagacttacttaaagaaaatgactttgaagtaccaccatttgcattaggagtatcagtttcagtaatagtaccagttgcaagttgcttacctgcttcatcaacaagcttaactgtttttgactttgttgtttgtgatgctgtgctattagcgttagttgtatcagcatgtacggtattgttttggaatgccaacgtactgccgatagcactagcagttaaagcagttgcgccaacaaaaatagtgttacctaattttgacatttaaattattcctttcttttctgctaacatatgtacgtttgtacaatataaaaataaaccgccaaataaatatttactttcttcatttcaaaaacaaaaaaatgataaatttgacggtttattatttatttttttaaatctaattttgagtctaaaagccaagaattaggatgttcaacaaatggtactggtgcatcactaccggtatttaacttaggtctcatttgaatatcaactatatttttatcattttcatcattttgcttaatcatgagaagattcctcgtttctgaattttaactttcagcacaataatacctttaaaaacatcaaaaaagagttatcacttaatttattagaaaatgcgatgcataaagaattagattagttaacagcaagcatatagtacagattattaataacatcaaacaataagctcctattttaaaaatccaaaatttgataaaaacactttttccaaacgacataaatccaaaaattagaagtccaagaattatgaaagaatatcttattgatgtccatttattttcaagatcggcatcacttagatcaaatcctaatgaaatactaatcattgctactaaaagcaaaactaattgccaaaacctaagtggtgaagtttgaacagaagaaatcattttgattattgctaaatcgaaattatgaaaatttatattcccttgctcatttacaagcaaatttgcaatattaacgcttgataatattaaatttggaaaaataatcttcataatgatcagcagaataattgtacaaccaaaaataggtgcaattcctacgaaggcattacctaatttctgatatgttgaattcaaatcaaaagaagaatcaacttcacctaatcgtaaattattatcatttttcttaggcattctccataatattacctttaaaacttgatgcccaaatatcttatttgccagataatgacttgcttcatgcaccactattcctaaaaaacctacaattgcttgtgccctaacaccattttcatcgaaagttaaattcaaaagtaattttgcccgatgacttaaaaatcgtaataccataattgcaaaggcaaaagatatgacaattgcagcactataaatacaactagagatcagattaactattaatgttgacatattgaatacccgcttaattaagaaaagaggtgtctaaaaaacacctcttaacaaaaatgtgaatatggaaacgtctacttttatttttttcgtaggcaatactcattttatcaaagacaagaatatatcaaatttatctttattttctaaaaagataaatagtggaggaaaaataatggaaactaattttataaagaaaaattttggcgataaattaatctatcaacaagaagaaaacgatctcgaagacagaattacttatacaacttttgctaaagggttggataaagaaaatataattatcttttttataaccaacgaaggtatttttacagatgatggctatactatttggaacataacttccaccatgaacataaaattaaacccaaacgatattaaaatcatttctaaaattgctaatttttatggtgtttcatttattaataattgtttagttctcaaacaaaaggatgatagttctaattatcatgatgaaatttcaaatatcgtatgtgcaattgtcgctataaatacctacattttgcttacaatctaattataaaagaaatataattgcaaataattctaaaactaatatgcttatataaataaaacactatacttattatttgattttaagatatataaaacattcacatagtgtcccaaatagctagctatattaatctcctactgttccagtataaaggttattactcctacttaattgcacaaatttatctctttttaaattatatactccagtataaatatcagtgccttcaccacgcttaccagtaccagaataccaactttgaaagtcagcagatattattacaggaacattttcgtttttatctactggacctattgaagtatatgtctcttcaaaagcagagtttaaggtctttccactttcaaaagcttgtattaaatcacttttatccatggcaaaaagattcttactatgaagcaatttatatgctaaatatggtttacacaaattcactctttgtttatattcatcctcagaagaatagttataaaagatcttgaacaaattatttacattattaggaattttctgttgagctaataaatcttgcgaactatgtttaatttcgggattacttgaacttagtgcatcttgtgcaacttgactcgcaactttagcattttgctgtcctatttgcgactttatattaatattctgttgttttatatcagcaattttatctgaataatttgaacgtaaatttccaaaaattaacaacaaaaataataaaacaattgataaaaatatcatagaaatttctaatatcctgaatttacgaggataatacttaaacaaattaatcacctaaattcttagttctaatattaacgtttgatccttgtgaatcgttaaaatcatattttagagttatatatgctaacccctttttgtcactttctctctcataaaatattgtataaatcgtaatccatattgttttttgattaagattaaattgagaaaatccaactttagtcgaaatattctttctagctatcattaatggtgatccaccgtctgaatatatagctgctttttttatattttcaaaaccttgactaccaaaataacttgtcaattcatcttttttagtttgtagatcaaccggtaattttgcttgtccaaacacgtaagatactaattctttatattctttttgcaacttttgttctttggagtccaacttaaatttacctgtttgaatctcatttccagtaggcgatatattttgaagttgagtctgtaacttttcattactcaaagcatacgaatcatatgtcttttttgcttgaagataattggtatacgtgtaaaaaaaacagagcaaaattaatacgcaagtaacagctgtagctatcaaaaccaattttttccgcttacctaaacgtcttttatttcttggacgtggtcttctaggctgatagttataactcttttgttgtgatctagctcgttgccttgcataagggttatttggacgattatgtggtctaactttagtgaattttccattcggaattctatttttgggattaaaatcattcatttttataccttttaagaatttattctctgcacaatattagtaactttccccgtggttttatcaacttcaataatcaacttaatactttcctttgcataatgcttaggatgatattttagatcgacattataaacataatttccatttgaggtttgttgataatcaataaaacaagagtcaaccacataactagttccagctttagcactatgaatagtttttacacctgaactcgcatcaccaattgtcaaatcaccattatttgatgaaacattaactaagtcattgaatttttgaactacatcagtagaaacaaagatgctattaagttgatttgtttctgcattagaaatttgagttagatccattccgcttccagaaacagactttgtttctgcaattaaatgaaagccaaaattgattgcagattttatattagatttccctttaacctgtgttatcgaaatattattagaatcagaatcgttatctgatggtatatttttgatttctacttttggtttttgtgcttcttgttgaatttgcttttgttgaatttgctgatcgtgcaaagaaataacaaagaaagcacctaaaattacaatcagacttatagcacttattacaataatttgaaatttgtattttttcattttttatcctctttaaagttagagtaatacttttaatttcaattcatcatttactttcaaatctattttttagaagaaaccttttttggctctgcaaatgttacacgaccattaggcagtaaagacgtaaatgaatatgcaattgtttgctcgtttactttgtttccattaccgcccatttcaatgactttagtattatttccatgatagttttcagctaaaaatgcagtatgtcctaatggaccactaccactacccacattgacaataattaaatctccttttttagcattctttgctgaaattcgctttaggtatttatgagccccttttgcatcagattccataaatggggtagaccagacttgaggggtaactgcgtagcctgtcctttttaatacgaaccatacaaatcctgaacagtcggttgtatccgaatcatcaggatgcttccagtgtgcatctgcagttcttgatgcatcataattaaatttacctaaccaatgtctagcttcttttaaaatagagccactaccagaaaagctaccgctacttgtatcatcacagtcttcaccagtatcactatcagcactatctgcaactttagcagcactacttagtgatgatttacctttccaaaggctatatccatacttcataccgttagcgtaatttgttaaatcgttactttgcatataactttgtgatttagctttatttacatagtcttgaatagatcgtggcttaccagttcttgcaaaatcagcctttaatgttttcgcccaatccgtagcaaattcactatcatttttataatgtcgatagttacctccttcagtcttgggcctggcagttcctttaggataaccacaatttggactccaagtcataccaccaaaattattatcaattcggtcaactggttgactcccatcgccaccttcttggacaagctgtgcaaacaagagtcttggtttaactccaaccttaggggcaacagccatagcaatattcttatatcgttggtagatatttttacctgatttaacagatattttcccgacctttccaactggacgtgaatcagagtttaagttatcgcagttattttgatcttgttgttcttgatcgtaaatccccccaccaactgcagctaatagaacgactaacaatacagttatcgcacctgcaattaataggataaaaaagaatttatttttaccatttgctgttctagataaaacattcatttatttggtcctttcttgaaaaacattttaagaagaaaaaggactataaaggtgcttaagtttagaattgaaaaaagcagattcttttattgattaacgcgtggtgctagttaaatcgttctagacaataagccaaattataagctaaaattgcaatttccaaccggctttgaaagcctatcagactacgtgctcgattgttctcggcattgtaataggtcagaagcgaaaagtcgctttcaattgttctgcgaatagccatcaattgatgatcattgtgctttttagctcctgtcatatttttacgatatggtgtccaaagttcataacccatttgttttagctgttgatgcagttctttgcctaaatagccttcgtcgccaagaagatagtaattagatggatgggcattttccagcagttcaactgtctccttggcatcatgaactgatgcttttgttacgacataatcaagaatgtaaccgtcatcgctaacaatggcatgaactttgaaaccatagaagtaaattttcttggtggccttataaccaatgttggcataaccgcgaaaaattttagcacgatagttgcgaattggttggcaaacaggtaccggaaagctgtcaatgatcaagaactgtccattcaggtcaacctttttattcatttcttgccgtatctgataaatcaattgcaatagctgacgtgaacgccgattaaaacgtgagtgtgataaacaattgaaacattcacagaatcttctttgtgattcaattcctgtcttagcttgccagataagtaaagccaaaatcagactgtccgtagttttaatttgatcaatatttcgccgatgagtaaactcagccggtgcatacaaacgataccagtgccgacaaattatcactaaatctttaaaactaacttgtaaatggtggctaaaacgcttaagcttaaggcagttcaatcagatcaggctcttttctattattatacaagttgagtctaacaagattggacttttttattaactaaaacgatttaactagcaccacgcgtattgattaatataatgtgccagtaatatgcatgttttatctctaaagtgattaacaaatatcacatagctgcttctttaatgtactttaactatttgctaaatagtagcttacttatatttgaatattatataattaatatatagatgcttttaaaatataagcatattagtttaatcatacagtacacatacaaaaataataaattaataagtcttgcataaaatttattaattataataaaaatagatatatgttaaaaagccttaataatgccgttatatcaaacttaaagcctattttcatagatttttcgaatggtcatttttctaaaatgaaagctaaaatgtgatagaataaataattgaatagaactaatgaaaaaataagaatggaggatctttatgagtaaagacagtgtcccaaaagcaattgcttttgttgctttaaaaggtggggtaggtaaaaccacctctgcctataactatggagaatggttagtaaaccattctaaaaaggttttgtttatcgacctcgatcagaactgtgacttaagtcaaaccttacaaagttataaagccacaaatactgtaagatacatttttcagccagaagatggacatgccgatattataaatatcaaacctaatttagatttgatcacaggtgatccagatatggaagatgttgaatatgatttagcattaaaaaccaataaatatatgcgtttatatctctggttcataaagaatattgatagtcttatgaaatatgactatatcatcatggattgtcacccagactttggtactatcaccaagaatgcaataattctaagtgatgttttactatcaccaataacgccacaaaaggcagcctacaataaaaaaggtattttacgtgaaagaatttcagaactatcacaagaagccattgattataaaagtggtgatacttttgtaacggcaaaattatggttttatggcaataatattgcgcataatactagagcttctagggaactaaaagctcaattagaaaacgaaaaagatgttattggtattattcctaaacgtgaaatctttaatacaagcttaacggataatattcctattgctgaaatggaaaaggaaaattctaaatatagcagatttaaagacttttttagtgaaatgaatgatttctatgaaaaagtaacaactaagattaattcactataaaaggggtaaaaaatggttaaccttagcaaaggtaaaaatttagatattcctgatctaaaagaaaaaagcggcattactaaagatgcagataaagcaagtgaatttgccaaagagtctgcaagaattagaattcaaaaagcaaaagaagaaaagaaaaaagaagaacaaagcaaacctatatttgatgatgcaattcctaaaaagacagattctaatttagatgatcgtttagttccatcaagttatatgattaaatataaagttaagaaaaaaataacggaactagttaaagaaaacaattataaatctgcatcagcattagttaattatttacttgaacgagatctcttcaaataatataaaaataagcctatatttcatttggtgatatgaaatataggcttatttatttttcgcttttaaacgtttttgcgtagcccccacttttcctttgtaatatgtttacaaaagaaaggaaagagcaaaataatgaataatgatttttataataattcgtctggttatgatgaaaattatttgaataatcctactcctcagccaaatcagcaatatcctaaaagatctcaatataaacctcctaagcctaaaaattctaaaaaacagattgctttagaaattttaaaatggagtacagtgggttttatttgtttaatagttatgtgtgtaggtctctttgctttttatgctaaagatgctcctaacgttacacaagaggagcttcaagcagggggagcttcggctctttatacaaatgatggcaagcttttactgagtttaggctctgacaagagaaactatttaaagagcgatcaaattccacagcaattgaaagatgctgtgatttctattgaagataggcatttctattctgaaagtttagggatttcacctttaagaatcgctagttccgctgttcaaaatgtaatgggacacaatatggcaggtggttcaacacttactcaacaactaattaagttatccgttttttcaactaaagaaagtgatcgtacacttaaacgtaaagcgcaagaagcttggttagctgtaaagatatctcatcaatactctaaggatcaaattctagagttctatgttaataaggtatttatgaattacaacatttacggaatgggaactgctgctaacttttattacggtaaatcaattagtaaattagatttagctcaaactgctttaatcgcaggtatgccaaacgcaccagtttcatttgatccatatttatatccagagcaagcgaccaagagaagaaatcttgttttagcagctatgcttgataataaaaagattacccaagaccaatatgacaaggcaattaaggaaaacattaaaactgggcttaaagagaaacatgatactggtagtagattaagaagaatagatgatccatatatcaaagaagtgattaatgaaacaagagcagatggattcgatccttatagaaataatcttaaaatctatgtaaacattaatcagaaagctcaaaacgagttatacaatctcgcaaataagaatgtaataccgtttacgaataataaaatgcaggcagctgctacagttattgatcctgataatggacatgtaattgctattttgggcggaagacatcttcctaatatccaattaggactagatagagccgttcaaactgaccgttcaactggttcatcaattaagcctattctggattatgcacctgctatcgaataccttaattggtcaacagcacaagtactcgaagatacaccatatacgtataaaggaacaaatattaaattatacgattgggatgatcgctttatggggaaaatgacaatgcgttatgcacttgaacaatcacgtaatgttcctgcagttagaactttagaagaagttggtattaatcgtggcgcaaaatttgccaaaaaattgggtattaaagttaaacctagtcaaggcttgagtgtcgctatcggtgcaaatgcttcgactctccaaatgactggtgctttctctgctttagataatgatggtatttatcacaaaccacaatttgtttctaaaattgaagcccctgatggaactacaagaaattatgataataatggtactagagttatgaaatcatctacagcttatatgatcactgatatgcttaaagatgtaatcaaaaaaggatcaggcaaagatgcaatgattaataatgtgtaccaagcgggtaaaactggtactgtaaagtatagtgatgatgaattggctcagtatccaagttacgagggaactccaaaggatagttggtttgttggttattctcctgactattgtatgggtgtttggactgggtatgataaactttcagatggcaaaattgataaaacgggagaaaagtctgcaatgcttttatataaagcaatgatgcagtacttgatgaaaaataaggtatcagcagattggtcaatgcccgatactgtagttaagcaagccttcacagcaggaaatgttacaactcaagaattatatgtaaagggacatgtaccagaagctcctaaagtcaaccaaaagattatagttaagaaaaatccaaatgatgatcaagatgattcagacagtcaagataaacagaaagatcgtggctctgataatcgtaatcgtaaagatactgataattcatcaaatgattctaattctaatactgataattctaatgattcatctgataattctaatactgataattctaatgattcatctgataatgattcttcaagtgattcagcaacatttagtaatgataattcctcagatgactcaaatagtagtgacgatggaattgtagaaacaccagaaaattaatgcagatataagtagctcttactttaaatataatgtggcattaaacaggctataaaagaccagtaattagcttcaatggtgcgtatataagtaaatcatcctgcttatagttataaactaatataaaaatagaataaaaataacttggcattaagaaaaagctctcagttaatttacaatgtcattaagttaagacattgacaattaatattagacttttaaagcactgatttaacatttaattggttaaattggtgcttttttcgtacaacaaataaggcatagcacagattctgcttttttaagctacgcgatataaataatatacagctgatttgggcttaatatttctcttgtccttgcggcctggtctaattggaatggtataatagctgatctgaataaggatccgttcaaaatcttgcgttaaagaagaagccaaatacatgctctgaataatcaagcatgattgcttgaaattgatggcatattgatacttgcaatgcttttgcggaatataggcctgtgcatcaatttgactgattgcattaaacataatcatatgggcataaatttccatttcaataaatttatcttgtttggaatggaactgtacactgcctaaagaatacttcaatttcttgaaggaggtctcaataccccaacgcagatgataaagctctttaattctttttagcggataattttttcgatcaagattggttagcacaacttcccattcttctttgcctgatttggcatcattaattctaaatttgcaggctcgaaattttattgtgcataactcgccaaaatcccagcttagatcctgggtatttttagagcgatacttaatatattggcgataatgatgctggacatggtgaatattctcactggctttatgcgtgatgtagtaatagttagaagtagttaccaggcaggaaatctcacgatcacattcttgatcaggcaatgtcgttatttctttaactccgccttgtccagccttagttcgtattatgtaatgacagttaggcaggcgattgcagttttcaatcatattgaaactagtgtagccacgatccattgttacaatatatggaccacaattcaaagctttaagcatttgaacagccgctttgcgttcatccatttctgatttaggctgaaaaatacaatcctggtaggtattattcaatagatcatataaggcattaacgtgaatttgacaatagggtttctttttatgagaagaagcttgtacaatgttattcgatttcggattccagatttgattaaagtcagagccatcaatggcaaacaaacggtagtgatgatcaaaaagttgaatattaaatagattttgattaaaaacagtcagaatatgtttaaaacaagcaggagaaagctggcttttgcgttgaacataggcagaagtactaactactttatcgttctttttagttgcatcttcgccaaaagctctaaagagttcactgtttaaattctgaccttgcatgttaattgtagttttaaggactgtcgctgcatctaaagtgcgtttcctggtaaaagcatgaggattattaataaaatcgtgaatatgatccccagtattattgataatttgatcaagacgttctagaatattcttatgaagggctttcataattaacaccatctttctggcaataattttgaaggtttaaaatatataatatataagataggcgaaaaggctggtcttttcgcctttattttatacaaaaaaagagatcgaatccaaatgattcgatctctaaaaaagcacccttaattgtcaatgtcttaacttaatgacattggttaatttactgagagcttttttactataactgcttgttctgcattttacgtaggaatgtagaataactcatattaaaatattgtgcggcttcctttttggtcttaaacgtacgtcccttaacctgtatcgttgaaaaacgtttttgcaaaatagtttcaagtaactgctcattacgaaaaccacgattgtaatatctcaaagcagtactatagggaataccataagcactagcaaaagtattaagagttaacgtttgaccatgaagcttaaccaagagtttacgatgcttcacgatccgtcacctctctcattcttggtctggcttaattaaattgctaaaaggatcagatggggaagcatctacatcagaatcatcatttgaattagattgatctttttcaatggagttattatctgaaactaccaaattatcaaatgaactagaatctgaattatcttgaacttgatcattatttgaaacgttttcttcttgttcaatatcttcatctgcaggtgcattactatcgttggaaatatcatccaaagatacaatagcagaatttaattcatcagcaccagcacgataactaaagatagtctcactatcatctaatccaaatgtcccttcacgtaagccgtctccttgaactacatatttatcaatatgtggtgctttgatttcataatgcttttgatattgaccggaatacgtcttagaaggcattaattgagtaccatctgtagagaagtatttaacaacaatcttagtagttttagccttatatgtgataggtagagtagtaacacctagatcaaagttaagagtaactgttggaccatttactggaagataacctttaactgcaggtacctcaattttacgactttctccgaacttaccataaatggattgttgtgttcctaaagatacaccatcttcagtttgggctattaaggttaccatgatttcttgtggaataattggaacattatatacacctgaaccatctaaataaatgctttgatctgcgcctgttggtaaatgatatccttgtggaatcattgaatcttcagcaatattgattgattcatggaaatatccatttccttttggtagagccttaataactttgttattgtaaacaaagttaatttgatattcctcatgatttactttgtattcaactgtaatttctttttgttcagcagtgaatctacttacaatctgttgaggttcagcggtataaccaaagtattttggtggattagtcttaaatggttgatccataagccctgttaaaacatcatcttcccatggatgcaaaccatcattttcaccacctttaattacaaagttaattaatgcagtttctttctttggtctgtaatgtaattttaaatccttgccgtcgagagaagatttaagcataccaccaataatcttaactggctttgctttagcaccttgctttggcttagttaatggcaagtcgtaccccggaattacaggcattcttcttgaccaaggttggttgactaatcctgaaacattcttgatgtatcttccttgatcaattggctcatcgtattggttaactggaatcaaattaaagttaacctcttgagctttatagaaaacattaatatcttgtctagtagctggaaaagtaccagttaaatcagcagtcgcacgttcaaatgtatatccttcctttggatgtgccttgatattatattgtttaccatagtagcctttgataatttctggctttcctaagagatttaaagcattatcataagaatgaataacgatttctgatgcattaggctgatatctaaatacaataggcttaggtttagcagtaaaaatgcccttagcgttacttggaatactttttggtgtatatccatcaatcattcttgctgaatagttataagctgtgccgacaagaccatattcagttttagcagggaaatctactatttctttaccagttttatcatcaatatacttgatttcaacagatacttgcttagccttgtaatttacacgttgtgtttcccttctacgactataagtaccttcaaagaactcttgtggcttaatatatccctcaatttgaggtaatttaaatttatacttttcacctaaagcattttttctaataataggcttggcgttaagtaatggtctacctgcttcatcttctaaaagaattttaacttgacattgaattttagaatagaaaacatcaatatctggattcttaaatgcgtcaaaagtaccactaaccacagacgttgaagcatcgtaagtctcaagttctggagtatggatattataaggttcaccaatcgttcctgaaactactctaggattgccggctcgttgtgtcttggctttatcaaaccaataattaatttgaaatttgacagtagctttattgaatcttaaaacaactgtcttatcttccttgtcgtaatagcctgaaagcaagctggagtcactggctaattcgtaaccatcaatcttaggaactttaattgtataaggcgttgtgtattctccatcagttgataaagacttatgaataacattcccagatctatctaaatattctactgtaagagttgtcttgataggcgcataaactaacgtaaaagtagtatcttgaggacctactttaccttttaatgcaggatgcttaattaatttataacccggaaaatcgtttttggacgaatcaatttcatagtttgaacctgttttgccacgcataggagtagtattaagaatctcgccagtggttgttttataaactacttgcaaattttgcatatttgcatcgtatactaccttgacttcaccatcgtgtttaggaactgtatatttacgtgccgtgaatggggtataaccattaacagttggaaacttggatggagaaatctctgatcctgcctttgctttataagttttgtttttgtttttaccaattggcttcatttgttcatcaacaggaacaatttgataagagacaacgtctggaatgtaattaatagttatgtgttgtttaagatcagaaatcacataattaaagtccttatcaatattaggcttatatcccggaatttttggtaaatcatctaaggttaatttttgtccatatttaccagtaaaccgataatcattagcaatttttgattcattattaacaaaactaataataattggcattgttacaggtgcactaggttttgacgtgagccgttcatttttatcttctgaagtttccttatcaacttcattagattcaatttcttgcttagcagcaggcttatcttcttcatttttttgatctgaagacttattttcatcaatttcttgagaactatcttctgaatctttctcttgctcattagaactgtccttatgatcttcttcatgatattcattagactcgttatcaagctcatcttgaatttgatgtgaagctttcttttgctgtaacttttctaaattcttttttaattggtctctagctctttcattttcatctgaagtaacttcttgatcagccttttcagcagcttcattcaaatcaggtaaatcagattcagatgttacagagctttgcttttcgccttctgctaaaccatctttttcaaattcagattttgaattttggctttccttagttttgtgattgaagattccaaatagtgccataacttttcctcctaaaaaacattattttgatcttttacagtattaattaaatgctaaaaagacaaatacaaaaatcatcttttaattcgaaaaaatggtgactctagtgaataatcatcaaagtaaaatgcttgggaaactattgataccaagtactaaacgcaaaatacatatatcaggcaattaaccaaaaagctcatcttataaatttgaagatcaaaagaaatctttaattcacttcaaatcaaattaaactaaaaacaaagaagggataatcaacattgacaccaattaatttaaatagaattcataatggcaaagacataattgctacagtaactactcaagataataaaaccatagcagtagttttgaagcctgaagatatagccacattgcgtgaacaattagtcgactattatcgaaaaacaggaaatattaatcctaataatgacattaacgtatttaacgattttaaacgcaaaaaaaatagccctcaaacattagaagggactattaaaatatcaaaaaaactctataaagattttcaatatctagaagttgaaaagaaaaggcttattaatttaaatacgcagttgcgacatttaaatagcaacttaagacaagagaacaaagccttaaaaaatagattgaattagccaaacatatatataccttcaaaaatcaaaaaagcaataactgctaccactccagaaattaaaaatatattatctttactactgcgaacagcctgagcagtttgattactcttattggtattaggcatcggcatgctactatatggatccatattagaattaggagttgctggcatgttctgtgcattcgcattaagatcataattaggcataggaagttgattcgtcatagaaaccattggctcttgatcaacgatatgaactcgtattgcagataatgaaattgaaccataacgatcaatggcttttaccaatactacataagttcctaattgattaaagttaattcttcctacttttaaggtgacactaccagtaatatcagtgccatcacgatcaacagcattgatttgcgttaaattactccagtttggacgtgtagtagtacctcgtttaatataaacatcctgtgaactaattctgattattggcaatatttgctgtgcttgtgggatatccaatattctcactttgatttgagcaattgcttgatttcctgcattatcccaagcagaaatcggaacgtaatataaacccggtttagcaaaatctacttttccactatcgacttgaatttgtcttggattaattaaatttcctgtggaatcaatagctctaatgcccacaagttgctcaatagggtagggagcaggtaagttcattttcaccaaagatatttgtgaaaattgcatctgtataactggctgacgtggaatgctcggttcataagccattttttgtccttctttctttttttataattttaagtcatcattgcaagtatttttttaaactctttttttcgaaaaatgagaattaagtgcccaaataaaagcggtacccgtttaaaaacagttaacattaataaacatgaatatgcaaattactataaaaaaagaaaaataagatttcacctttctgagttgtaaagtatttctaattagaaagggcaaaaaaatgaaaaataatccgaaactgaatgcaattttatcgtatatcatcacttttgctatagcagctgctgtagtttttgctttaaatgctgtagttgtaactaaacagacggtttctggaccgtcaatggagcctactttacaaaataaacaaaatttactcactttcaaactagcgactccgcatcgaggtgacataattgtgttcaatgcagaaggcgttgatccagatgcaggaacacaaaaaacatattacataaaaagagtaattgggttaccgggagatacggttagatcaaaagacggtaaattatatgttaacggtcatttagtaaatcagagctatatttcaaaatatcaagcagatgttggaacaggtaactgggatttaaagaaactaaacacaaaaaataattgggtacataaagccaccagcaatactgttccacaaaatgaatatttctgtttgggagatcaccgttcggtgtctaatgacagtagatactttggctttgttcccaccaataaagttattggagtaagcaaatcaccaatgctttcactttttggaggaaacaataagcaatatgtaaacaagttccatcatcaattcttcatggatgaaaaattaaatcaaaaaaattaaaaggctaattttgaattagccttttctttttttagatttaagttctgtatattttcttaagcgaacaggagaaggtttgaacacaacacgtaaatatgccaaagtaggatctatgctactaccatttcttaaattttgaataatattgggtgcaatattacgaaactctggatcgaatctaccaaacttatcaatgctaaccgacataccatcataaagattgtcccaaaccaaatcattaaatgaatttaatacctgccgaataactttcttatcaatattagtttgcgcattaatttcatcaatcaaagtcgacttagatactcgtgcttttttagacatgtataccaccttcaaaaacaaaatattaaccactaccgttaatttttaccaactataattagtttacatcaaataatcaagaactaaaactaactaaaaaagcggcaagattctcaccttgccgtttttagtttgaattaaagttttactttacaatctttgcctttaactctttgcccggacgaaaagctggaattcgagttgcaggaatttcaatttcttccccagttcttggattacgacccttacgagcagctctggagcgaacttcaaaggtacccaatcctgttaatctaattttttcatttttggcaagttcatcaccaattatttctacaaacacatctaaaacatcgtgtgcttgacgttggctaatacctgccttttcagataatgcttttactaaatcttgttttgtgaaattcatctttgttttcctttcataatcaactgatatgattgcttaaacatatctatcgttaggatatcaaataattataacaatggaaattatctaattaacctaaaaaaggcgaaggcaatacatttatactttattttttcttagatcgaaaaaaatatattttgccttgaatatcactaaaataacgttgaaaacaatttagaaaggaaagctctatgaaaaaattatttattattggcttattagctactaccttgcttttaggagggtgttctggacaatcacaaggggcaagctctaaagcctctctagggtctaaaatagggcaaataaaaaatgcctattctcaagctagttcaaatactaaaggaaacatttctaataccgaaaaagaaggtcttagtcaagatgaatatactaaattagctaaaagtaaatttcaaaatggctcatatggttacatttacgttaataataataaatcaactttaaatcccgagtcatggaaacaaaacaaagtagtctatagtagccttgataatcttaatcgtgcttctaagccaaatattggctatctagagaaaagaaatattgctaatgattcattaagaatcagacaaactgtagagccaacaggatggcattataacaccagaaacggtgagcaattatacaatcgtggacatcttattgcttactccgtatcggcaggtattgaccaaaacggaaattataatccacaaaatcaatcaggcgaccaaaacaatcctaaaaatttatttacacaaactgcatattcaaatcaacaactacaaaccatttttgaaaagaaggttcgcacagctttgcgagaaaacaaaaaagtaatttatgaagctacagctgtctttgacggaaacaataaaatggcaactggagttaatttacaagcggtctcaactgatggctccttgaactttaatgttttcatctataatgttcaaccccactacagctttaatcttgcagacgggcgtgcaaaaaaagataattcggtggtagtgaaagaattgccaacatcattacagtctcactacaatgacaacagagggaacaatagaacctcacttaatagaaagtttttcaagagaaatagtagttattatcaacatcaaaaatgggaaactcgcctacatcattattactaattcggtcattgcatcttgacataaaaaagccataatgcaatggcttttttgtttctccttattaaagcaaaaatattttagcttcaaaaattttttaaaataaagtcaaagaaagttgaaggtaatattttgaaaataactaaagataagcgaaaaaaatttttgtctaagcataaacaaaacaaaagaaaacaagttagaaaatatgttaatgctcaaagcaaaatgcttaatgaattcaattcagataattcatggatgtatgcatatgtatgcccagaagactacccccaagaattttttaatagcaaaactttagatcagctttgtaattacgaacgtaatactagcttgaattttacaattgcgaaaaaatttcataatacaaataatcgaaaaatcttaaaaaaactatttgagcaacaacaacctgtatattggcaagcagtactagccgatatttcaatgcccaaaaaagcaaatgagcaaggtgaattgcttttaaatcatgtaattaataaagcttacgatcctcaagacttttcaattggttttacccaaaaaacacctcaaattgattatcacttatggctaccaattaacaatattttgtattttggtaagagtccacaatatttctcaataggagatgtaattactggtaaaagttgggtcacaaaataccactataaagacaatagggaacagtatggtttagggaaaacaatcattaccaattgtggaataccattaattaataattactatgcagatttaagtgaaatacctacaataaaagctattagtcctacttttatatctaattacaatagggaagaggactgggttttaaaattaagctattcgtctcagtatttaagtgttcttaaaagatataagaagatcaaccttagcactttaaaatatctttctggacatccaattgcacagtacaaaagaaatattcatgataattttcatattagattacataagaataatgaatattcatcatttggtgatttagctagtgatctaataaaaagaagcaagtaatagtaaacagaaatctcactatcacttgtttctttattttggagttatagtcgtttcttcttaggatgggcttgaagccaatgctcaccataatacttgcttttctcatcaagtccttgtttatcaatgttattccttaggaacttccgcatctcagcttcagaaagccccaattgtgccataaaatctctatccgtgaagccaagatagtgacaaatataataggcttgagggttaatttggcgggtctgcggattaaaaacatcatacttcccacgaaaaacactaaaaataccattagtttcactgttcttaaaattttctcttaactttttaaccatttcagctggaacacctgctatagattgaactgtatcttgttgctcccacttatctttctcaatctttttcatttgctgtggggtgggatctacaccaatattcactttatatcccagataattgttcacttctcgtggcaaacggtctaatacataccatgcattaatcatcgttgtagaattaagttcctgcggagtccaataatcagaaatattacgctttttttcttccgtcatcttttatcacctagtttgttagtctatttacatttacataataattcataattataaaagtgtcaaaaatatgagacatttttatgagaaatatttttctaacttcgtgtttttaaatattacatgtaagcagagatatattgttgccacagatgctacaaaaactataaggcttataattgctaatcccaaactcaccttaatgctttgaagaaacaagtctatgctttgaatactaatctcagttgttacaatcaaaaatataataaatacaagtttaaatattgcctttaaaaattttgctttcataatttctcacagtgtttccattctatattgtttcattcagtatagttcaatcaaaattttgaaacgaaaaaaagacaaaaaaagaaccgatacagttaagtatcaattcttttcgttttgactattatttttgattagccttaaatactttagtaagtaatggcaatgtttctgcagcattacttgctttaaataaataaagataaaattcaaagccaataataacttctgaaataattacaaataaaaagcctaaatttaacattacaccattggaattagtatagatgaatagcaaacttagtaatagtagcacgggaagacaagtataggcacgttcatataaatagttcttagcgtgagcttttgtagaattattccaaattttctttagatcttccattgatttaatcgttgtccaaaattcttctggaacattctgttgaatgaaatataaaattactacttgcgcaatcactaacagaataatcaaaaataagagtttatataccattatttccacctctctaactgattgctagtatagatatttttatggcgcttaaaaaaataagttaaaaaaactaaaaatgcatattaattgttgtttttgcataatagcagatcaatttattgagactgtaaaatagtttgtgtaaggatgaatatttccttaaatttatttctttaaacattagaaaaaggagttcctttctcgtatgattggtttgaacaaaaaaaacacatacagaaagaagaactccttcatgaatgattttaccaaagattttgctcaagctctattcaatccagacaaaataaatgatttattgcgcaaagaactacaacaggctgttaataacttgctagaagctgaattgactgcctttctgggctatgatccctatgccagaaatggctggaatactggcaactctagaaatggtgcttatttccgcaaagttgatacgcaatttggcccaattgaagtgcaagtgcctcgggatcgcaacggtcaatttcatcagcacacgctgcctgactacaagcagcactcggatatcttggaaagcatgattatcaagctttactccaatggcgtgaccaccagggaaatagccgatctaattgaaaagatgtatggcagccattacagtccagctcaggtatcaaatatttccaagcagatgattccaaaggttgaggcttaccacaaacgcaagctaagcgacaagtttttctgcgtctatttggatgcgacataccttcctttgcgccgagaaacgtttgagcgtgaagcagtctatattgccattggcattaaacctaatggacataaggaagtcattgactactgcattgctcctagtgagaacattgaagtctggacagagatgcttcaaaacatgaagtccagaggcttgaagcaagttgaactctttctttctgatggtgttgttggcatgaaaacagccttggccaggacttatcctaaagctcattttcaacgctgtttggttcatgtcatgcgcaatatctgcgctaaagtacgcgtcgacgatcgtgaaaagatcatgaacgaattcaaacaggtgcatcaacagacaaacaaagaagaagccacagctgtcctgcatgacttctataccaaatggggcaaggtttacagccatgttatcagaagcttgaaagacatagaaccagatctgctggtcttttataactatcccaagcagatcagagcttcaatttattcgactaacatgattgaatcatttaacaatgtgatcaagcgcaaagctaagcctaaggcagagtttccaactgaacagtcgcttgatgcttttattggtattcaggcaatgagctacaatgaccgttatttcaatcgaattcataaaggctttggtcaggttcaggacaccttagaatcctactttgattaaataaataattaaaaaatcaatttacgagaaagaactatttacacaaaagatttgacagtttcaatttattagtatttatttgaaaatgatttttataaaaaattattttagctaattgttttagttactgtttattgtagctagtttattgtagtttctttgttattaagttgtttattgcttagcagtaaacagcttttattactttttaattctaaagtctacgtttaaatagctttatgtttttggaggtttttattatgaacaatgagtgttttaaagatttaatggaaaaagctaacaatttgaagttaagaatcacagcaacttgcaataaaacaaatacttatgttttaaatttaaacatgattactgatacttctaccttcaatgaggaaagcttagattacactggaaaatattggactgaagtttcaagtcactccaacagtattttgtattctatttctgggactttagacaaaaagcaaataaaatacaaaaatttagacaaaattactttagtacgaactttgagaaagctagtaatgtttcatgaagcacaatcaaaatataaagattttgactggtcattcattcaaagtcttgttttaccagatgtgagtgaaaaactttacttattcgatctcaatccatacaaagatgacgtaagaaatgacgtagatattcattcagtttggggatcactacccgacaatgatgaagtttacgcattacttactcaattacctaatgtgcttaaatatggtctaattattattcaagacggcatggatcctgattgctatcttcatcccttagataagcaagatttactttcacttaaaggcttagtttgggatacagaatcagatacaaaacaatttgataattggatcgaccaaattgttgaaaaagtaccagatattgatacatcattattgacagatatgccagttgaagtaactgcatgtgttccagatgatgattcaaaagcaatagttaaacaaaattaagattgcttactaaagactaaaaaatcactttgattttttagtctttttttgcaacaaaaaacatctcctgtactagaacaatgtcattaagttaagacattgacaattaagggtgcttttttagagatcgaatcatttggattcgatctctttttttgtataaaataaaggcgaaaagaccagccttttcgcctatcttatatattatatattttaaaccttcaaaattattgccagaaagatggtgttaattatgaaagcccttcataagaatattctagaacgtcttgatcaaattatcaataatactggggatcatattcacgattttattaataatcctcatgcttttaccaggaaacgcactttagatgcagcgacagtccttaaaactacaattaacatgcaaggtcagaatttaaacagtgaactctttagagcttttggcgaagatgcaactaaaaagaacgataaagtagttagtacttctgcctatgttcaacgcaaaagccagctttctcctgcttgttttaaacatattctgactgtttttaatcaaaatctatttaatattcaactttttgatcatcactaccgtttgtttgccattgatggctctgactttaatcaaatctggaatccgaaatcgaataacattgtacaagcttcttctcataaaaagaaaccctattgtcaaattcacgttaatgccttatatgatctattgaataatacctaccaggattgtatttttcagcctaaatcagaaatggatgaacgcaaagcggctgttcaaatgcttaaagctttgaattgtggtccatatattgtaacaatggatcgtggctacactagtttcaatatgattgaaaactgcaatcgcctgcctaactgtcattacataatacgaactaaggctggacaaggcggagttaaagaaataacgacattgcctgatcaagaatgtgatcgtgagatttcctgcctggtaactacttctaactattactacatcacgcataaagccagtgagaatattcaccatgtccagcatcattatcgccaatatattaagtatcgctctaaaaatacccaggatctaagctgggattttggcgagttatgcacaataaaatttcgagcctgcaaatttagaattaatgatgccaaatcaggcaaagaagaatgggaagttgtgctaaccaatcttgatcgaaaaaattatccgctaaaaagaattaaagagctttatcatctgcgttggggtattgagacctccttcaagaaattgaagtattctttaggcagtgtacagttccattccaaacaagataaatttattgaaatggaaatttatgcccatatgattatgtttaatgcaatcagtcaaattgatgcacaggcctatattccgcaaaagcattgcaagtatcaatatgccatcaatttcaagcaatcatgcttgattattcagagcatgtatttggcttcttctttaacgcaagattttgaacggatccttattcagatcagctattataccattccaattagaccaggccgcaaggacaagagaaatattaagcccaaatcagctgtatattatttatatcgcgtagcttaaaaaagcagaatctgtgctatgccttatttgttgtacgaaaaaagcaccaatttaaccaattaaatgttaaatcagtgctttaaaagtctaatattaattgtcaatgtcttaacttaatgacattggtactagaagatgttgcttttattttttaattgttcttattattagaatttgttgaatcttttccatctgaatcacttggttttgcttctttacctttatctttatcaaaatcaggatcattcaaaggatcattaggagtttgggttagagcatccaagaaactattcttaggcaaagggagctttttctctttaccttttttcatctcaatttcagatgaattcatattaatagttcttgaagccttagtaaggtgtccctccatatgtgactcacgtaatttagtattccgcttatcaggatgaatctgtacacgctcaatcttttctgcatctttttcaataattgaatactttgaacaaatgtggttaaaaaaggcggctaccgcaataaaaccaattaaacagacagcggtagcaaaacaggaataacttaatgcagctgaaagattagccgaagtgtaataatccactggcttattaattacaatgtagcggatttctagcaaactaactgcacacatcagacctgcagaagcactaaacaagcctgccaaaagtcttagcaacttacgttgagtaaaattatagactgttttttccaatggaagtttatcatttgataaatcttgatccttgatgatgcttttcccgtagagactcatcaaataaagaaccaaagcataaatcagcacgcctacagttgtacaaattaacagaagacatgcaaaagctataaaaatattttgtagaaacagaattgtcattttaagacctcactttttaatcgttcttgaatttttcaagtaaaacactgcagaagaacagatatctatgattacagtaattaggtaaagagtagggatcagctggttaatatattggcagaacaaagcaagatcacctaaaacactaacatcaataaagttaaaatcggcagtaaatctgaaaaccagccactgctgtattaacagagctaaaagccatataacttcaaaagagatcattaggtttttaaacaattttgaaattagtttctgatcttgtgtatacagcttcttgtttaatcttttttgcaactgatcacggcagttaaaaataagccaaaatgggattgccaatattaaggctagaaaaatctgcgaaaacaaaaacattatttttcacttcctgccacttgctacttatcaaaacgctccatgtcatactgttcaattaacttgatcagcttttcagcatatcccggatcagtagcataaccatcttttactaaagcttttgcttgatctttgtagttcttagccttaaagacatgacggtattgattcttattccagctagttccttgatgaagagctatatcatacgagcgaatagaatcagcatatgaatcatatactctaaagcgagccatcttggtttgccagccgtccttatcgctgtattctttagtttcaagctttacagtacgtttcttatcattgctcttcatgccaaaaaggtttttatatttcttagcaagcttactattgccataatcactttcaagacaagcttgagcgatagtaatacttggcaaaattgagtatttcttgtttactttcttggcaattggaccaatttcattaataaatgctctacgttcttgctcttgtttctctttttgagcttcgattttcttctgttgctgttcaacttgttgttctgtcactttacgatcgtgcgcagaaatgacaccgacagcacttgcacctactaccgatacgaccattaatccgcaaataaacattttgccaattttaggcattcttaaaatcccccttcaagcaaattttatttttcttagctacgactgtagcgattgccagtgcaacagttgcagtaccaatggctaaaatacatttcttaaatcgactctttttagctagtcttgatgaagagcgacttctataattctttaatgcttgatttgtatcatctgggttttccgtccaagcatatctacctcttgaaagatcggtaggttcaacaatataaaatgctagatttgttgattttcgtttactcattttttaattctccctatatgtttacgtttaacaaaaattattgtagaaaatttttgttaaatacgataaaaagcttatagattgtagaaatcacattcttaaaggcaaaaaattataaaaatcttctaaaataaaaaagccattcaagagaatgactttttttatttttaataccaatggtgctgttcccagaagctcttagcatttttccatgagccgtatctgccttttacatagcgattagcagttgcttcttgatttgccttactgtaatcaccatgtaaataacttgagcttaattgatatttaccaatattattgaccattgcgggcattgtagttgccaccagattcatgatttgcaatccaattcttagcaactttttcagatgagttcatccctctattggcagttgcatgtctatgatgagaaacaatagattgacgcttggtagattttaagacaattctgcctttttcctgcttgtgatgggttacaggcttaggctgggcagaagtctttctcttaacacctgagcgttgtctatgcacgccaccaataaccactttcttagcatgatgatgccttgatactggagcagaatatgaagaagctgagccattatctcgataatcaaaattatcattgctatcagagccaatatcagcactagagccgtcataatttgaatctacttgatcatcatcttctgaatcttgctgtaatagttgatctgcatcattatcttggtcttgatctggttgagcgtctgaattttgatccacagatactgtttctggttcaatagtagctgaacttacatagttagttaaagtagcagaggaggaagaagtagcgagattagaatcaggggtagtagctttatttttattaggtgctactacaacttgatctgggaagcttcttaattggctgtgtccaataatgtgatagccttctgggatatccttgcttaaatcaaaaagcatatatccgttgctgtaattgcgttgaaccaaagtacctgtagcaatttttttaccttgttgatcaacaatagctacatgcttggaagattgactaactactttagcattcttgatacgtgaatcattggtactagaattactactttgagaagcacgcacagaagcatggacagcagaattagaaactccgcctgcacttaccactgcagttgcacctccaaggagcagtgctgcatctttaagattgattttcatagaaatcttgtcctttcttaaaaaatattttcactttaaaccttattgctaaagagaataaaaaggcgttttagctttaaaaataaaattcagtatttttgtttttggatcaaattaataaaaagcatttttcaatagtcaaattgctagactgaacaaagatgttacttaaaacagagaataaaaacgaaaaggatgatgataatcatgtttttctacttactgaataaatttgacactttgattctgatacttcttatcatcacgggggttttagtcatactagcattcattgcttttgatagaaaaagacgctatacggatgttaaagatatgaaaaaagaattactactgctaattggctcatcagcattagcaatgatatttgcgtttcttttagcagtagacttctatcatatagttagaaattattaattcaattatttcataaggatttatctgaatggataaatccttattttttatgctttctcttagttttacgggtatatatgatataatatttactaaggagatgaaactatgaaagctggaaaagtaatggaattgcttcaaatcagtcgctctactttgagaaggtatcgtctcaatggcaccttaaaagccaagaagctgccaacgggacaatatatttttgatgatgattcggtctttttcttaaagaatggccgttctaaacgattgacagtaatctatggtcgagtttcgacatacaaacaaaaatcagatttgaccaatcaaatgcaggagctacaggatttctgtcttgctaaaggctatgaaatcaatggatcctatcaagatattgcaagtggtatttcttttaaggatcgcaaacagttctttaaaatgctcgatctgattattgatggaaaagtagaaagagtggtaattactcatcaagatcgtttaagcagagttggttttgaactgttcgagtatttatttaagaactacaatactaaaattgaagttgtttctgatgaagcgaatcctaagacggatgaacaggaattgtttgaagaaattatcagcctgctacactgcttttcaatgcgtgagtattcgcatcgcagaacagagcgcaagctgatcgaagatgctctgcataaaaaagattaagctcgaaactatttaaaggaggtgaaactatgaccaaaaagactaaaaatgtgcctagaaattctacccaatatactcatctttgcagtgaatacatcattcccgctagtaatattttggataaaattagttacaaggctcatgatctatataaccgtgccttgtatgatttgcgtcaaggactttttcataagcaatatgttaaaggctatgagcagcttgattccatgtttaagaaaagatataaagcgcgtgaatgcattctctatcatgagctggggtatgtgcagtcagcccaacagactcttaaagaggtcaatacgatctggcaggcttggtttaaggccaataaagcttaccagaagaatcctggcaagtttacgggtaagcctagaatgcctaaatacttaaggaaaaaggagcgtcataccttctttgtgaccaatcaaaacgccaaagtaaaagacggctatctgactatacctaaattaaagataaaagttgaactggctcttcaggtaaaaaagatccaacgggtagcctttaagcctgtctacggcggctataagttgattgttcaatataagattaataaggaaattaattatctgccggataatggcagatacattggcattgatcctggagtagataatgcttttgcctgtgtttcaaacactgaaaatatgccactattaatcaatggccgcaatcttaagtcggttaatcagtactataacaaggaaagagccagacttaagaagctgcaggctcaataccatcaattagaaagtattattaataccaagcaaggccctaaacctgtttatcaggaaaccaaagcaatgaaaagacttactgtatggagaaatgacaagattagacagtttgctcacaaagcatctaagcgtatcgttaattatgcgctaagctgtgaggcaaatacaattgtcattggcaacaataagtcatggaagagatccagcaatatgggaaagaaaaacaatcagaactttattggtattccccataaagtcatgattgagatgattcaatataaggctaatctggctgggattagcgtgattaggactaatgaaagctacactagtcaaaccagtgccctggataatgaaaagccttgctgggagaacggcaataagaaccgtcaaagacaaggcaaaagcccagtaaatcgcagaataaagcgaggcttgttcaagacaaacaatggcaccttgatcaatgcggatattaacggtgccatgcagataatcagaaaagtattcccgaaaacaagctttgtcaacgggatagcgggcgtagtgttacgcccagttaagtggactgctcttatttgagcagctgcttaaataagaaaatagttggcgcttgccctgcaaggttgaagctgatgcaaagttgtcctatagtttcttgttttctaaaaaacaaggagtgctttaaaaggtttttagtgaatattgaacagcaagcaaacgcattcttaggcaaaatgatggcagttgaatagatttgacatcattgacctaatattttctaacatgaacgaaatcagctcacaagttgaagacgcaagaaacaatctggtaactaattcagttattagtgaaaaaaagaacgaaattaaaagtgatcaacctataaatacgaatccatctacgcataggatcactatgccagacaatcgggtatacaacgttaaagaaactgaaatgcttagaattgttcagcagacttctaatcatgaaatctggtacgttacattcaaagttcgccctaaatatcgcagattcttgtctaataaatacagcttgtgtaatattgctgacgcagaaaaaccagaatgggttattacagtaagcaataagtccaacaatcaaagttctaataactaagtcatttttagaagacataaggcaaaagcccactttaaatgtttttgctttaaattaaaactgaaatttagaaaagaaactaatgaaaaggtgaaagaaatgttcaatattttttccaagaaaaagaagaatcaagcaccacagcttcctcaacttaatgatgtaaacacagcccaagaaggagcttctgctttagaaaaagaaaaagaaattcaatactctgcaggtaatactcctttaactaatgcaaagactgatcagcaattaaatgctcaagctaaaatgcccaatccatctgtaaattcttctaatcaagctacacagccagcattgcctaatatgccaagcttagaccgttcagaagagtctgttcaacctaatttgcctaacctgaacatgcctaacgcaaataaggctactcaacctgccgattcaaccccaatgcctaacatgcctgatatgtctcaaaatcagcctgcaagcgctcaaaatacacaagtgtcggattctactcaaaatcaagtaaaaactggtagccagcctaattttagctcaggggatgccgtagcagatttcgaagaagaatctacttctaatcttcaacaatctacagaactatctgcagacgcttctgatgaagtgcaatatgaaccagcacaacaagagcacgcaactactactcaagaaaatcctattgaaaagaaatatgctaacgttaaattaacgccaatggatatttacaacaaaaagtttaagaaaaaggggagatacggctatgatgctcaacaagtagacgacttcttagacttagttgtacaaaagtatgcagatgctttagatgaaaattcagatctaaaaaataaaaatcttcaattgcaaaacaagaataaggacttaaagcatgacattgcttttgttcaagaagaactttcaggtatgcaagacaactatcaaaaagaagttgcaaaatccaataagcttgaagaaaaactaaaggctaagcctaagactgttccagctgcaaatgttgatatggacgaaaagaaggcagaagttaacgaaattattgctaaagctcatgcttatgcagcaaagattaaggaaaaggcaagagcaagcgtgaaaactaacactaattctcaaccttctgcagatgaatcagaatactacaagcaaaagattaatattgttaagaacaatattggtaatttaaagcaaagagttagccaatacagcaacaatattcagcaatcacttcaagacgagatcaataatttaaatgattctttgcctaagaagacaattaataagccagctgttagccaaagttcagaaacacaggatacttctcatcatctgaatattgattccgatagtttaaacggtgtagtaagtgaagacaagcctaaaaatgatgatgcacaacaaacaaccagtttgagtgatttgattgatcaaactccgtcattctaatttgtttagataataagccccgcacatttttatctttagagaaaaaagcagatctactagatctgctttttttgttcttcaaatagtaatgcatccctctaaattgaagattgagcttaatccgatttactttttctaaaattacagatgaatccattttttagaaaaataagtaaaaaaatttagtaatctatctatcgtattattgctatataagcaaaaataaagaagaggtagtactaatgacaaaggtgaaaattgattttgatcgaaaattggataagaagctcaataagaatccaactattaaaagcgtgggaattatatataaaactacaaattataatctcttcgtgctaaatgcaattaacagaaatattaatccagcaagggttcaacactttgttagggaatacaagaagagaaacattatttctcctattgaggttatgcgtagcaaagatggaaaactggtcattttagatggtcaacaccgctatcgtgcatgggtcaaaatggatgcaccagtttacttctacgaaaccatttctggcgatgattctacacaaggattgcgtcaacggaatcaaagcaaatcatggactagtttagacactgtgttttcttttgcttctgataatcgaaatccagaagttcaaaagcaataccgtgatctacaagaaattatcatgcttactcaagaaaaactgggacgtgttcctttgatttcacttattgaattagcatctggtattgataaggctttagatcaaaagatagtctatgctaaacacgatttcaaaaatggcttataccagacactaaaccgagaagactttaagaaagttattgaacgaattgcaattatgcagaccagattaactaagcccgttaatttgaccgccacaatgtttagaggactgtttacattgttaagcaacgaggatgctaatgctgcttacttggctcattgcattaaccaagatcgacttgcttttgatgctatagctgccagcaatgataatgtattggttgctaaagaactgtttagtctctacaacacaaaagcaactcttaatcgacaacagccaatttcaattgctatgggacttgacggaattattctcaaagataagcactacaagctgtatttaaaaaatgaaaagggcaaaaaaagatcttaaaagataagtctatgggggatgcagcaaaaaaatgcatccctttttcaaaaaaatacaaatacaaaaaaaatacgcaagaagtatttaacgagagtttttcaaatgaagttaaaaaacaaaagaattaattataacggtaagcactacaattccctttctcaactggctagagattacaatatttcaattccaacaatccagaccagatggcaaaaaggtattagaaacccagaagaacttattgctatacctaatttaaataaaaaaataatctgggaaggaaaagaatatcaatccaaaaaagatctattccgccaccttgcaacgccagattgttctgcaagcttagtcgaacaaagatggtatgaagggctacgtacacgaaaagagctaactcgccctaaccaaatgcaccacaaagttattgttaacgggcacgagtataattcattagcggagctcgcaaaggcttataacttgcctaaggctctaataaagaaaagatggtatcgaggaattagggaacctcacaaattgctttgtcctaatcccatatcaaaacaaggtaagccaataacttgggaaggaaaaacatttataagttataaagccttattccaatatctatcaacaccgacttgttcatgggaattgattaaaaataggtggaagaacggaatcagagacaaagaaagactaacagcgtcaagccaaaaaaattcttcatcctgtttcttttcagggaaaacattttacttcattgggtgcattggcaagagaatttaatatttcttctgatttagtacgaagtagatggcagcgaggaattagaaatcctaaagaattaatagaacctaccatagcatcttcaactgcaaagctaatagactggcacggaaagaaatttcctagccaaattgatttgttcaaatacttagctacgccagaatgcaattggaagctcataaggactagatggtacaaaggcattagagacgaaaagaaacttgttgcgccagcaaaatttaagtctcagagcatcaaaattagttatcaggggcaaaattataaaagtctaaaagattttgcaagaaatttcgatataagctattcagctgtaaaaggccgctggcaaaaaggcattcacgatcccgagcaattacttaatcccgttcaagaatctaaagattttcttattcagcaaaagcatgaaataattgaatatatcaacgaaattctacaaaaaaaaggcttaatttccccttacgaattagctaataaagtatatttaccacataaactgttaaagagcgttggtaaggatattattcgtggacaaaatagaagaatcggtattaagcgatcagacattgtagaagtcaaatatactgatgcagaattaagcgatcctagattaatcaacagcaaactattgccaaaatacgcatatagaatgagcgctatagatcacattaacagcaaaagcagggaagttgttgaaaaagaactaaaaattatccctcagttaacaggtagtcattatttctgggatgaatcaagtcaatctgtttggtcaaacgcacgtggcacaggtagtatcttctacaaaattaatggtgccaataatcatattccgttcagaattgataatcacaagatcgaattacccaaatcttctgttttagatttgattgcttatccaaatatttttgcttctgacttaattttgtgtaaggatgctaaaaatataattacagaagaattgaatgcttcagaatatgcaaatattactaaaaaagcatatgcacttttgcccaaagcacaccaccgaattgataataactacaaaataaaagtaggatggactaagaaagaactaagtgatgttatcgaacaagtgaaaaaacaaaacaatatctaatttacaaaaaaagaagcaggtctaatgcagatctgcttctttaattttgataattttgtatatccattcttagatgctcgcttatttgcttttatttttcagttcttatttgttaatcatcatcaacgctaaatttttgatgttgacgaatatactttaaatagtttctttgtttatctatatcttcaagatcgttaagtatatatctaatctttttattgttatggaagtctgtcgcatatccaaatacgctgtatgcacctttgaaatatagaggagcgtatggagcatttatatcgccgaatcttgttttaagcattttgagctgaacaggatgatcgtataaacgcatagcatacatagatgccttttctgcatcccagtttgatttggaatctttaatagcattataaagatttaccattgttgtcttttcatcaatacccaaaattccagcttctttaggagcttggattctccgataatcattctctaacgtcataactgcatctgcagtgtattcaatatccccactttccttgaaagcatctaaaccaacatcaatgttgttgtagttactacggttaaaagaggagaccacaatgactggaatctgataagtgagactcagaatctttaagctgttaattgcagaagtaatattctttttatccgtagctctaggatccttgccacgcaaaagctgcaaatagtcaataaatactactggatatttgccagttctcaagatgtaattttcaacttgatccgctatttcatctgcagaagggcgatttaatgcttgtcgctgaatagacattttggaggtaaaagtacggtagtagttaagtgcaaggtttaaattacgcaaaatttcaggattatctccccacttttcttcccagttaccgtccattatgtttcttgcagtaggtctattttcaatgcttagacttgcataatcttgtccttcatttatgctccagcatattctgctgattgattttgctatcaattcttcgggtgacatttccaaagcaaaatacattacatttttgcctgtttccgcaatgtgatctgcaatttggagcatcaaactagttttacccattgcagaagtggcacctagtacgtaaagtcccggataaaagcctttatgcaacaaaacatcaatcaaagggatgccagatgaaataggcttgtgttgctgttcactgactttatcaataaacttgccaaaattgtcattaggattttgaattgcattttctagcgcaagatcaaatgattctgaatcatgttccgcaaaatcatgaatagtaagatagtcgcctgtaattgaaatctgctctgctacaaaattatttttcctaagcttacgaaaaagatactgactggcttgactgtcatttttatctctatcaaaagctaaaagaaaaacaggattatactgaccattttcaaattgatcttctcttttatttcttaaagcaatgatgtaattaagcaattgattaatgctttgcatagagatgttttcatccgcttcttgcagcgaataaacatttgcatttgaagaatctccgtttagaagggaagaaaaaatcttgtttgcattaatatcactattagtgactataatcactccattatcatgatcgagcagatttttttgattaaaatttctattactcattgatatgcctccctaaactttatttcatgaaatcttgcaataaatttaagccattgctttcattgggctgattttgactcttattatttttgttattgcttttcttctttctatcagattttatttttggcttgaaaatctttgaagaatcgttagaattctttgcgtctgcatctttctctttcaattcttttttctgagtcaaagaagtatagggtggcttaaatctctgaaatgtaaatttaatcgcagtgattgtaggtcttcctttgcctttcttctcggtaattaattcatatttaagtcccttaaaaattggttttaattcttcaacagctgggtccaatattctggaggtaaataaattaaagtgcttagaactcctataactttttggaacgcctaataactcacacagcttttctctgtcttgagttacccagccaaattttggatactgactaattatgcggtacagggtttttgagtatttgctttttaacccaaaaaacttttctaaatcatatactgtaaaattctcagttaatttcgttaaatagggaagggctttagggttaatctgcacagttaattttttggtttcagcatctgcttcaaaacccggaaaaatgttgaatttataaaatttatatggttgaccttttacgtctgtttcactaattagtgcagctttatccaacttatccattatttctttcaaatactttgccagacgatttgcagatctgctctttagtcctgttaacgtggcaagctctttaaacgtaaaggtgatttcttgataatcataaattccacctctacgatcttgattggaaatctgacttgcgacagcccagaaaagattcatttcaatacttgaaaatttgggaaatgtcatttcatttaatttgtttccataaatagccaagtcattatgtttaagttctttaccgttaatatctgtagccattgatttatcctcttaagcaatttaaattttatcggtacccgctaaaaaaatacctatttttaacaagttacaaaactgtatgttaaattgaatttgctcagcttatttactatataaatctgcttatataaagcttaaaatatatttatcatacacttttacaacagatgtatgataaatataccacactttaacacacaagaacagaaattctgtgtaaaaataaattatatgcaaattcaaagtcaaaaaaatagtacatgaaagccttttatatcaagcttttatgtactattttactaattaacagtaaaaactctttttatctataatctcttcgttttttaaaatgacttgttacaaaactgtatgcttaaacctaaaaaatgttacaaaactgtatgttaaatctctaaatttgttacaaaaccgtgtgctaaacccctaaaaatgttacaaaactgtatgctaaaagcctcgccgtccttactccctcaaggatttagcttacccccaaaaaacttttaaaaatgttctaaaaaacatttttaaaagtaagatgtttttttagaactattttcaactttagatctagaaaattaaaaaaatctacagagatcaaaactgttttttagatctatataaatccattttctaaaaataaaaagaaatatattcaattaaaaaaataattcaaaatatattttatgtttaaagcatttataaatctaatactgacttatttgtttagtaaattcaacaattccctaaacaataaaactcaacaaaactatcaaaaaagaaaaattctaaaaaacgggaaagggattaacatggcacagaataataatttcaaacgttccctaagcaataaccagatacaattgattgcattaggtggaacaatcggaactggattatttcttggagtaggaggcagtataaaaaaagcaggaccagcaattatactgatttatgctctagtagggttcttcttattcctaatgatgcgagccttaggcgagcttattttatctgatttagaaaaacacacctacactgactttataacaaaatatctaggcgaaagaattggtttaagttctggatatttatgttggttagcatatatcacattggcaatggcagaaatgactgctttaggtatttattttcaattttggtttcctaagatgcctttatggttacccggaacagtaacagttctaattctcctaagcattaacataatttctgcaaaaatcttcggtaattttgaatttagttttgcaattctaaaaatactaactgtgctttgttttgttgcctttattacctttatggctttatttagcaaaaaaacatactttggagcaatttccctaagcaatatgtataaatacaggggattctttccaaacggcttacatggctttttagagggtattcaaatggcaatctttagttttgtaggaattgagatgattggatttactgcttgcgaatccaaagatcctaaaaagataatgccgaaagcaattaatcaaatgccgattagaattattctcttctacattttggcaattttatcaattttggcggtaattccatggaataaaattgctatcagctatagtccttttgttcaagtactaaacgtagtcggtattaaaaacagcgcatcatttttcaattttgtagttatcactgctgctgtttcgtcaacaaattcgataatttattcatcaggacgactcttgttttctttgtgctatggcagggaaggtaggtggaataaaactatgggacacatatcaagaaacatgcttccgcagagtgctttgattttctcggctttaatgattgcattagcaccagttctaattttgcttattggaaatgatgcctttaatttcatttctgcagtaactaccagtattttcctgcttatgtggatcataatgctgattacgtatttagtttatgtaaaaactgatcgaaaagatctcacgtttaaattgccacttgcacctttcagtgattatgttttgattgcctttttcagtttggtagttttaattttattgttcttgaagtcaacacgtgtccctatgcttgttgcaatagtaatttcaatccttcttagtttgattttgaaattacaggacagtgatttttttaaatcaaaagtaaaaaaataaatactgtgttgccgactaaaattgaattaaattttagaaaataggaaagaagatttagagaatgaaagttttatcttttatgtcgatgagtggtggagatggcaagacagagcttacctactgctttggcaaatatttagtaaataagggctatcgtgttttattcgttgactttggcaatttacccgacttagcaattaccgttttgacaaatgatagtgccgaatttaaggaaaaaatgtctaaaaagaaagtcacaactatttcagatattgatcatgaattggaaaaagcacatgatgttttaaaaccatataagatttctgataaaattggtctgctccatgtttggaacatgaatgaaaatgaattgcgcagacgtttcgtactttacaacacatcaaaggataaagatgaaattctttataactgggttcatagcgtagatttagaaaaaaactatgattatgtactttttgacacaccagaacgtttttacctaaatatttttactcaagcttctgatgctattttcagattggttagtgattcgcattacagctattctcattttttgcgtttaaagagtttagtaacagaaaatgaagataattcatttataacgggaaagaaaattattccttcttacctaatcattaatcacgttaatgatgtgcaaactaagacaaacttgcgagatgaccttgaaaaaacaggcaacagcgtattgactgaatttccatataacgaaagcatggatcaaatttatcttggtaaagaacctgctggcgataaagaagaattagataagcgattcgataagatcttgaaggttgctgctcaagctgatacaaaacagattgtgttctaaatgacgcaatttttatatcttttagtgtcacaaagctgcattgcagtaagtctttctgctacaattgacgaaaagaaaagagggactgcaatggctggctgggtttcaaaaaaagaaatcgaaaaagtgaaaaaaagcgtgaatattgttgatgtagttagtcattatgttcaattgacccaagagggcaatgactatattggcttatgtccatttcacagagaaaaaacaccgtcttttaaggtaaatcctaagggacagttttttaaatgttttggctgtggcaagggcggaaatgtttttaagtttctgatgctgaaaaacgatatcggctttgcggacagcgttaaactcgcagaacagtttatggatgcaacccctgttacaaatacagttaaaacacaagaaaagccagttgagccaaatcttttatacaagattaaccatgaagctagttacttcttttatcgtgtgcttcttgatactaaaacaggagaacgtggcagaaaatatcttgctgatagaaaaattggtcaagatgagattaatcatttccaacttggctatgctccagaagacggcaatattttcttaacttatttacgtaagagaaattttactgattcgcaaataattaaaagcggcttgtattttattggatcaaatggtgaactggtttgtcgctttcgtgaccgcataatgtttcctgttttaaattctgagggcgtattcgctggctttgctgggagattagttgcaaaaaacaggaacgaacccaaatatcttaattctcctacaacagattcttttaaaaagtctgagctgctttatcatctatcggaaactagatacactcaggctcaagaaaagcaaattgttctttttgaaggctttatggatgtgatttctgcttataaggcaggaattcagtcgtccgtggcttcaatgggaacaagtcttactcaagaacaggttggcttgcttgcaaaaaacagtaataacaagcagatagtgattaactatgatggagattctgctggcaggaatgcaacagaaagagcattggcactgtttgaaagatatggaggattcaatgtaaaagtcgttgctcttccagattcgcttgatcctgatgagtatataaaacgttttggatcaaagaagtatgctcaatgtgtaaagtccgcaataaagccaagtgactttctaataaatcattgggaaaagaagtttgatcttaaaactgaaaatggcaagaaagagtatattgattacgtcttaaattacatttctggcttgaatgatcctcacagaaaatcaagaatgctacaaactgtcgctaagcgaataggtgtagatgagtacgaattacaagtggaattctcctacagaaataagcacaatgcaccccaaaatgaaaaattaaaagggtatacaacttatgatagatttacagatgcgcaaaattcttcaattcctaagattcaaagaaagagtaataaatcagatgatgttcagcaacatctattaatgctgtacctgcattcaaaagcagctagaaaaataattgatgagaaagattttgcctttccaaatagcgactatcaagatgtgcgccaaaaatataaattatttaaagatgcaaaccctaacgctaagatttctaagttttttaatgccttagatgatcattttcaatggataatagtaaatctagaatcaaatgaaaaacctttagaatttactttgatggaaatcacgagcttgattgattcactttcaacaaagtaaattttgattttagccgaaccaaccaagccttaagtaattttagggagagttgagagatggcacttgaaaaagatcaaaataagccgactttggatgaagcagttaagaaattgattaatgacattaaagacgattctgaaatcacggaagacgtttttactcaatcgctgataaagccttatcaccttgaaagaaaagaaattgatatcttagtgcaagaatttgaggataatgggatcagcattgtagatgaaaatggcgatctatcaaatttagctttgcagaaagatgttgatgctgaaaagcaagaattaaagactacctccatgactcgtactagcaggaagacggatgattcaatccgcttgtatttaaagcagatcggacgaattccgcttcttaagccagaagaagaaatctcattggctaaaagagttcatgaaggagaccaagaagctaaagaaaagcttgtggattctaacttacgtttggtagtttcaattgctaaacgctatgtaggtagagatctttcattcctagacttgattcaggaaggtaatattggactgatgaaagccgttgaaaagtttgattataaattaggctatagattctcaacttacgcaacatggtggattagacaagctattacaagagctattgcggatcagtcaagaacaatcagaattccggtacacattgttgaaaccatgaacaagatgggaagggttcaaagagagcttgctcaagacttaggacgagaaccagtgccagaagaactggctgcggaacttgatataaccattgaaagagtccttgaaattaaaaaagtatctcaaagaccattatctttagaaactccagtaggagacgatgatgaaaactctaatcttggtgagtttattgaagataaaaatgctccagatccagaaagcaccgctcaatcagaaatgcttagaaaccagattgatgaaacgttagatactttaactaatcgtgaagaaacagttttgcgtctacgttatggcttggacgatggacgaggtcgcacgcttgaagaagtcggaagggtgtttggtattagccgagagagagttcgacaaattgaaagcaaggctttgagaaaattacgtaccagaaatcgtgaaagagcattaagacaatacttataagaaaaagaagcagtagttaataaaactgcttcttttttctgcgcatatttgtgaaaaataagcttctgtaggatgagctttaaagcttttagaataatagtgtgaattttatttaagaaaggaagttaagaaatgtcacaaaatgataacgatccagagatcgctgcatttcatggaaaacaaaacaacgttatcaaggaaaattctcctcgagaaaactggtcaatttatgtagacgaaacctattttcgatcagttcaatctgaacaaaaaatagatcgttttataactggcttttttgctgtagcagataaaaactacagagctttagagaataactacttaaaaatcgtttatacaggtacactgccgaatacagaaattaaaagctcatatgtttccgatcagcttaatgttaaggctcttatggcaactagaggatgggatgcactctacaaagttagacttgctccaagaatgcttccgaaagaaaatcaaaagcagaatgcttttctaactgcatatcggtatgcaaattatgttttgcctacaatttcaataattaaaaagattattgaacaaactcatgctcaacagttgaatgtaaaaattcacattgaccaccgagatgaaatggaacagggcactgctttttataagtattgcaatgaaatcttgtacatgattaagcatgagattcaagaaagaacggactgtttgctgggcttaagccttgatttagtagattcacaagaaaacattggtgtacaagtggctgatatgctttgtggcgctgctagaaaacaattgctttacagtgagtttgagcctaataatcgactgatcccgtttaaatatgagcttgataaagagcctgtagatgtactttgggataaggagttaatgtatatttacggcgtaattgaaagattagaaactgaacaaaaagaaaatattaaacgtaaatacagcttaaagattgaaaatagagccagtgatagagacgtaattgatgatcactatgtcattaactttgctccaacaagcgaaaactttaaaattggtacgagaatcaaggatttattagacaaagcaaatattaatatgcctaatatttcacttgaagaaacagaaaactcccctaaaaattctgatgaagtaaatactcctgctcaaagaggggatgatattcagccaaaagtgattggcaaaatcatgcatcctattatgcctttagctccgtcggcttcagaaaaagaaaaaagtggcgatcttgtaaaacctattttgccagccgtaaaagctcctaatcgcttaaagaatacaactcagccttcatccacagcagtacctaaacttttactagaaaagcttaataaggcggaaaagctgttagatttctttatgcagtatgccagctttgctttagagcaagatattaattcacgtagggaagtagcaaaatatttgagtcaaaatgcaaataagcttgcaagtatatttgataggctcgcacagttaaaatataaaaagaagaagcccgatgctgtacttaagacttttaaaaacaatttaactagattgaagaagagactagatcaaattgatatcagtcacctaaacctgttgatttataatcttaatgtattaaaaaattcaggtatgccactacacgcaaaatttatggaaactgtcaaatcttttgtgtaaatagttctttctcgtaaattgattttttaattatttatttaatcaaagtaggattctaaggtgtcctgaacctgaccaaagcctttatgaattcgattgaaataacggtcattgtagctcattgcctgaataccaataaaagcatcaagcgactgttcagttggaaactctgccttaggcttagctttgcgcttgatcacattgttaaatgattcaatcatgttagtcgaataaattgaagctctgatctgcttgggatagttataaaagaccagcagatctggttctatgtctttcaagcttctgataacatggctgtaaaccttgccccatttggtatagaagtcatgcaggacagctgtggcttcttctttgtttgtctgttgatgcacctgtttgaattcgttcatgatcttttcacgatcgtcgacgcgtactttagcgcagatattgcgcatgacatgaaccaaacagcgttgaaaatgagctttaggataagtcctggctaaggctgttttcatgccaacaacaccatcagaaagaaagagttcaacttgcttcaagcctctggacttcatgttttgaagcatctctgtccagacttcaatgttctcactaggagcaatgcagtagtcaatgacttccttatgtccattaggcttgatgccaatggcaatatagactgcttcacgctcaaacgtttctcggcgcaaaggaaggtatgtcgcatccaaatagacgcagaaaaacttgtcgcttagcttgcgtttgtggtaagcctcaacctttggaatcatctgcttggaaatatttgatacctgagctggactgtaatggctgccatacatcttttcaattagatcggctatttccctggtggtcacgcccttggagtaaagcttgataatcatgctttccaagatatccgagtgctgcttgtagtcaggcagcgtgtgctgatgaaattgaccgttgcgatcccgaggcacttgcacttcaattgggccaaattgcgtatcaactttgcggaaataagcaccatttctagagttgccagtattccagccatttctggcatagggatcatagcccagaaaggcagtcaattcagcttctagcaagttattaacagcctgttgtagttctttgcgcaataaatcatttattttgtctggattgaatagagcttgagcaaaatctttggtaaaatcattcatgaaggagttcttctttctgtatgtgttttttttgttcaaaccaatcatacgagaaaggaactcctttttctaatgtttaaagaaataaatttaaggaatcattcatccttacacaaactattttacagtctcaaaattaaggaagcaattcaaagtaaattaaaaactgtaactttagataaagagatttgtgatctttatattccattaaatggttttatagtaggatattattgtgttaagcctgaatattttgcagtcattcagcctattgtaaaaaagtacgaagagcaatatccacaaatcgctaataaatggactaaaaagagcattttcaaccttaaattggttaatgacgaaatcatggatgatgttgaaaaaaatttacttaaaaaatggaaagttcggttaattgaagctggatatgatgtaaacgatgcaatgggatggaaattacatgtttctggctggcaaaaataattatctaaaaagacgttgactaaaaagatcagcgtctttttgatttataagaaaataatgattaacttcgaaaaattgaagaattgtttgaatatttaactacaaaattgaaattttgtttgttaattatctaaaaaacttttaaataccccaaaaattatctcattttctaaataaaaaaggtgatttagtaaaagctaatatcattaattatcatttagataaaaaatgcagttattctttaaaaggaaggaaattgatatgagtcaaaatttgaaacacaagattttaacccaagaagaaactccaaagtattcttttagaaagtatagctttggtcttgcttctgctttgattggcttaacagcattttctggggggctaaagggcactattgccaaggctgataccgtctcaaattctgccgttgctgatcaaaaagatatagatgctaaacaaaataataaacaggcaacactggatatttcatattcctatgagcaaaaacaaacacaagatagcaataagaatgttgctgaaaaaaagaatgataatcaagtaagcactgaacaaaaacaagtagctaatgtgcaagcaaaaaatgattctcaagtttcttctcataatgaaagcaatgagagtaaagagccagctgtaactgttaacaagcaagctactgcacaacaaactaacagcaatactgttaaagaagagcaggagagcaagcaagttgttactaaatctcaagaaaatacaaacacttctactaccacaaagcaagttaagaacaacgaaacatcagctaccattgctaacgctatggtaaataacagagagaatagatctgcagttgctccaaaagctgaaagtcggtgaaaaagaatggacctgtcctaattgcggacaagtcctagatcgagattataacgctagtctaaatatcagagactgggcacaggatataacgaaacatccaaagcatggtaaaactattaacgggcgtaaggttaaagattcagacctacttttagtattttaaataaagaaaaaacttggcacagacgagcctttacataaggtattagatattaagaggtactggctgggtttagcaggatgaaacaagactgttataaagccaccaatatctaatgctgtaaaaatagggaataaaggtatttatttctgaaacttgcgaactatgttcgcaagtgtgtcatcttatatggtgcacaggagttccatattaaagaactgtgggacagtatcgctgtagctaaggaaaaaggtgtcaaggtactactatcaattaatggtaaacgtaaatctaattcagaagatatatcagtaacacctcctgaaggattattggaacgtattcttgatgtagatgtaggtgtatctatggttgataggttacaaaataaagggcatcgaatgactaaaagccgagtaacagatcgtttaatgttaacgtattaatgatacagtcataatttccaataacatagttctaattgaagatattaatcacattgtatttataaaataaaaggcatccctcaatggaatacatactctgcaacgctattaagtatgttttattctactaaagggatgcttttttattaggagctaccatttaagtctgcaagctagtagacgatcccatagagagaattgaaatttcttgtcatcaatttgtgattatctttaatgagtacaaaaatgtgtacacattgtgtcaaccgaggtataatataaaaaaagaaaaggagaaaagctatgactattaaagcaacgacaacgagagatttacgaaagaatttcaaaaaatttgctgatgatgtttcagattatggtgatgtggttttagtgacaagaccagagaagaaaaatgtagttctactttctgaaaaagaatataactcttggcaagaaactaattatctattatctactaaagctaatagggaagctttggctaaaggcatggatgataaacgtggaactaagcgcttgtcccctgagcaatggtctaaaatggtagataatgatgactaaaaaattagatatagtttttaagggaattagttggaatgactatctttattggcaaaagcaagataaaaaaactttaaaacgaattaataaattaataaatagtactattcgtcaaccatttgatggattaggagatccagaaaaactaaaaggacaactcagtggatattggtcaagaagaataaatcaatcggatagaatggtttatgccgtttatgacgatagaattgagattatccaattacgtttccattattctaaataagataatttgataaacttccgtatgacagagccaacgccaacgtaagtcctgctggttgggctttaggcttgttatatggtgctctatcacgtgttaagcgtgttaaccaactgcaccttactactaagccaactgccagaatggttaacgtgagtccagcagtgctcaaattctacaaacaagctctacaagataattaaaatcattaagtattattagatatgcatccctaccgtgggttatctacttatataaagaattattttgtataaggatatctgcttgggggatgcatattttttaacctccataccacgtcatactttataaggtggttatattagggtgaaaagcacctctccatgagaagtcgttgtaatcagaattcatttttaactaaaaaaagtaaaaattgagaagcaattaatactggtagcatgatgttgcttatgatgataagtaagtcaattgttgaatcaattattactaaaaatagatttgaggttaaaaaatgaagcaaaatattaacaaccctaaatggaacaaagaatatcaatcatgcagattgtgtttgaaactaatggaatctcatttagaaaatgagttaatcaaaaacttaaaacatcctgcaaatcttgtttttgtagcgaatatctatcgaaattgcttgctacagccaacatttaagcatgaggggatgaatgtgcttaaactgagaagcagcgttctaagcactgacaatgatgaaattatcaaggcttgcctaactattctgaaagccttaactaaattgaacttcaagcttgatagttacactgataagcatttgcataatatcagacgtaccattctgaaagactggattgataagatgcctaattctaaagaattgtttcaatcctacaatgatcaattacatgactatattcttcaataagtatcaattctttcaacgtagtagaagtttagaaaagggggggtaaaaatgccaacaactcaagatgtaaaaaagctgatttctggaattacttttggtaattgggatgaaatctatgatgctggtgaaactattgcttccaaattgattaagcaaggacatagagctgatggagattggataagggaaacattaaccagaaaagatgtaccgaaatatcttcaaaaggctaatgacaatatgaattatcatgtaaccactggcggtgcatccctagatgatctcatcgttccacctatggttaaagaacagcttagacagatttttaaagaataccagaagcgtaaattgctcaaggataacggattaagcaatgcgaataagatcttactggttgggaatcccggtactggcaaaacaatgactgctgggattattgcgcatgaactaggcttacccttaagaacattaaggcaagaaaacgtgattaatagtttaatggggagtacggctaagaaactttcagcattgctaccgatatacgatgaagcaggagcattccctgctgtgtatttcttagatgaatttgatacttttgcttctaagcgattattagcccaaactgctagtgatcgggaatacaacgagattaccaacgtgcttctgaaagaaatggatcatattaattcggactgcctattagtttgtgctactaatcttgcagcgggatttgatccagcggtttttagacgctttgacgcaattattcattttccagatgctaatgttgatactactaaacagctaataatcagtttgcaagataagttaatgcctaattatattccaagtggtaacgtgcttaagaagttgtctcaatttccaccaagtataataaagaaaattattgaaaatgctaaaaaaacgtctttgctcgatgaagttgaaattgatgatgaattgtttttgaaattgatagctgaaagaaattccaagtaaatttcagtaataaaaaagtggctacaagcgctgatataacagcatttgtagcaacttttatgatatactattaatagtgcaggtctaaatttcgctatacctaattcataacaaggtggttttagaaatagaaacctttttgttaaagtgctggttggcaacgcatcgacctgcgttgggatagtagcactaagctaatttaccaacctgactattgaagtaataacttcttgccagaagtaattatagcatgaattagctatcttataaaggaagtcgttgtgaatcaacggcttctttctttatgtattaactatgaagaaaacaaaggagtaacaagaatgattttgacaagaagtgaactggaaaacgtaactttgcatgatgaccctaactacatcaatggcggtagttggattctgggtgaaggcgcatcacaagctgatattttctgtgattatgtatttgctcatgataaaaaatgggctaatgaaggaaaaattgaactagataagctaaatagcaagctcaaggatttcaacatcttaccgcttcatctaattgcttaataattgagataagaaaagaccgatgctactttggcatcggctttttcctatggagtcgtaccgtaaggtacaagaataatcaactatcccagaatcaattacggggttaatgctgacgtagcagtgcatccctcatgggtgaaaacaatatttctgctctcaaagtaaacatgacttaccacccatcaaatagatcggtggtctcttacatagagattttgcgaacaacctaggcttgtctcgtccactcgaaaatgtagcttagatttaatctaagcgactgtggctttttaatttccacaacgacatagaggtcggtctatcttagcagggtctaagtccatacccactgtttttatttattatgcgacagctcgcattagtatattctttgaagcgttaatatctcgatcatgatgcgcatgacagaaagggcaagtccattctcttactgcaagccaatcccttgttttcatatggttaaacttagggttggctttatgacaattagagcagatacgactggtatattgcggatgtactacaatcagctttttaccgtaccaacggcacttgtattcaagcattcttctgaacatgctccaacctgcgttggctatgttgtgagcgagcttgtgattgcgcatgaggttcttggttttcaaatcctcaatggcaatgacatcgtaatgcttaaccagccaagtagtaactttttgcaggtaatcatagcgtttattggctatttttagctgatacttgctcttagtcttacggagcttttgccagttctgaaagtcatatttatcaatcttggtttctttatgctcatgattgaatctggcaactcttttttcgatcgctgtgcggttacggtcagtatgtgattgacgcttattcttttctttttctaaagcaaaggtatcggggacgctccaactgtctccatcactagttacgagccattcatttcctaaacccacatcaattccaactattcttttagttttttgagccttctcttgatagttgtaaagaagctttttttctttttcgacaattacactcataaagaacttgtctaaatcttggcggtatttgattgtaagacgtttaatcttacaatcgacaaggctctttaacgaactggttcttaaaactaatttcttaccaatactaatatggtgaggatctaatacatatatctgttcatgatttatacctttagtcttataactaacgtttttaaaggttgctgtttgaagataataatggcgcgatttaaacttgggcggttttctgccgactggagtttgcttaaagaaagcttcctgtgcattgcagtagtattccgctgtagcttgtaaagaagtagaattaacctctttaagccaagcatgctctttctttaattgcggtaatagtattttgagcgagccggcagaaggaaagaataaatgaggattattttgatagcgctgatcggtcatgcttttaatctgattccagaaccaacggttagcaccaaaggtcttaaacaacagcgctttttgttctctgctcggatagactttaatttgacttacacccaacttaattatgctagctgatgcattgcttctttgtttcatttattttcaccgcctttctgttttaccgtcttatttataaggacattcccattgtgtttcgacataatgtttaatagtttcttctgagcaattaccaactgtccttgcaaaataagaaggagaccaaagatgatgatggtaaaactgctctcttagttcaggtttaactttaaatagccagcgtgcggtggtacctttaagcttctttattaaaactgtcactgataaccacggtggcatcaccacttctaaatgcacatgattaggcatcactgttaatgcttctacttgacaagagttttcttggcaaatatctctaatcttttgatctaatagttttctagtttctttgtccaaggctttattttgatatttagtcaccaaaaccaagtgataaatcaaaacagaaacgctggaagaagtatgatattcttttaccattaccttcaccgcctttactgatatatcaatattaactgtcaactttattataccattaaagacacaaagtaaaaggaaggagaacaaattcatccactcatcaaagatgggtggtattctttgttctccttcctagctattcgttcttattgcataaagatgagactattgctattctaactagatacagcttggaccagatgatcattagagattatcttgctgaaaacgaaatatgcatccctaccacgaataaaagctctcttctacaatctaaccgcatgtttcagagcttctacggaatgctatctgctattagcaatgacgatttaccgcaattcattgctaaggcagacattatcagcaatagaagatttcagaagatgctctgggcaaactactataaacagcgcaaacctcaacatggtattgtcggcttcttaaccagcgctaaggatagtctattaggcgagagttttttggctgataattggcgagggatgctggatcatttcataaagaaaattaagaactacaatgaaaatctaaaagataatgaagactctttagacgatttgtggcaaatgattcaagaattatctatcaaccgtatcagctaccttgtttcaaacaatatagttaaaaaatacacttatctcagcgtatacagctatctcaactatttaattgataagcataagacttttgatgaactacaggtttcagaaaatgcaaaagtcaagaagctggtcgcagataaggaaaaggaaccagaaaaggctaaattgggtatttacactatccataaggtcaagggacttgagtttgataacgtatttgtcattggtctgactaatcaagatgtagatgatgctgatcttgaattaaataaagccttgccagctgattatagttttgacgagttcaaagaaaagattaataagttagccgttacaaaagatgaacagttgaaagacataattacgaagctttattctgctggagttcaagacagttctgaactgtatatgtcttttcaattacaaggatatgattgcttcccaagaacggatagggagttaaagatcatctatcattcatattcgcagctgctgcagaatcttgaagaagaaagaagacttatctatgttgcaataaccagagctaaaaagcgttgttacgtagaaaaggtgagtgactacttggaaagttcgcttattgatgagctggaagaaaatataaattttcaatgaaaaacataggcatgagttgaacttgaattaaaaatcttctataatgacaacttgagaagttcttaattcaaaaaggtagaattaattgcttatgctctcatactgtggaactcaaagtggcagctttgagttcttttttataggtttcttttttaactgattttctgtcttagaaatcaagtaagatactttagagtaatgtcatatatcacgacctttcagttggtgaatattacttattaaatttttgatggatagtatctaatatattcttaaatccttctaagtttattgaaggtacagccccgaactgtcctttaatatatcttttttgcaaatgatacatcatgtcgccctttagagggagaagaattaatgtcataaatagattttaaatgactagcaccttcttcatctttctccatcaacagcatttgatctactcttatgtcgttgtcttataggtatagtaagaaataattaactaaattagatcatattattagtcttgatgtaataatatgatctttttatatggagataagattctctgtattagggatgtctttttttgtctgataccataagtcaatacccccgaacccttaaccctagggggatgtttttcttccccttgggggatgtattaggtgcatccctcaagataaaaatgactgatatttgaactaaaaacatcatttttgcattttaataagaaattctgactatgctttgtctgcttcatatactaaacatatgagttaaggaaaggacaaaaggacaatgacttataataccaagacaatctatccagcccaagaagatagggacggaagaaaatttacgacaactaaacaaacagatatagcagtagagcttaaaaagaatgaagtcctaaagctttacaattcttacagagaagcagactactcagttaacgtatcttttcagccaccacttgctacaaagagtaccgatgaaaaagagggcaatgatgataaagatgataaagcagaggtagtaagtttagtaagtccttttgacgttgctaagagattagcaaaacagggtattgaataccgagcttcattaaagatcaagtctaagggcgcttatgaagatatgaaagatgttatgaagcttgtcgaagcagagggctatgaatataacgtaaatgttacattgaaagtcaatgatgagactactactaacattaatgatcctttatcttggactgatgaagacaacgtattcaaggtttctcctaaaaccagtactgacgatgcggaaaaattgcaccagctttatgacactttgaacgataagggatatgaagttgaaatcacaattaagcctaaagcacccaaatcaacagatatggactctgagaacgagacatttgctactcaactttccgcttatccagacggcaccttggttacctttagacttagcgatgaaaaagtgtaggagtttaggcgctgttatgaccgatttaaagttaaagctgactaagaacagcaagatgtacaaagacttaaagcgcgttgaatacgaagccttagagacatataagaacgatctctccgattacaaggcttttagtgagtacgttagcaacttactactaagactttctctaagcaatgaaaaagtctttacttgctggattaatagcgaacttttatctaatgcaagtagtgataaggttgctaagaccttggtgttctttcagctctttgctcaagaaaatggcttgcagttaagcgtagatagcaagcaaagcaagcctaactgtccgtttatcactcttagttggtaggcggatccatgcatccctaagcaataagatcttcttaatatattacatatctatatacgcgtggtgctagttaaatcgttttagttaataaaaaagtccaatcttgttagactcgacttgtaaatagtaataatagaaaagagtctgatctgattgaactgccttaagcttaagcgttttagccaccatttacaagttagttttaaagatttagtgataatttgtcggcactggtatcgtttgtatgcaccggctgagtttactcatcggcgaaatattgatcaaattaaaactacggacagtctgattttggctttacttatctggcaagctaagacaggaattgaatcacaaagaagattctgtgaatgtttcaattgtttatcacactcacgttttaatcggcgttcacgtcagctattgcaattgatttatcagatacggcaagaaatgaataaaaaggttgacctgaatggacagttcttgatcattgacagctttccggtacctgtttgccaaccaattcgaaactatcgtgctaaaatttttcgcggttatgccaacattggttataaggccaccaagaaaatttacttctatggtttcaaagttcatgccattgttagcgatgacggttacattcttgattatgtcgtaacaaaggcatcagttcatgatgccagggagacagttgaactgatagaaaatacccatccatctaattactatcttcttggcgacgaaggctatttaggcaaagaactgcatcaacagctaaaacaaatgggttacgaactttggacaccatatcgtaaaaatatgacaggagctaaaaagcacaatgatcatcaattgatggctattcgcagaacaattgaaagcgacttttcgcttctgacctattacaatgccgagaacaatcgagcacgtagtctgataggctttcaaagccggttggaaattgcaattttagcttataatttggcttattgtctagaacgatttaactagcaccacgcgtatctatatctataaaatcgtcttttacaaatctaaatttacattttaaggtaaataatattttctcaattcacttaggggtgcatgaaaaaagcaggtaattacccaatgcttaaaacattgtcgtttaattacttgctttttttcatgctataaatgaatattttgctaccttgttttctttttactatgtatttcattcgattgcgagaaccattgatacatcaagcattgcctttttttctaagtatttcatcaatattgttttagcaactcttatattattcgtttgaaattaccttaaagtgtctccaatagcttaagcaagcaccttgagactacttttagataattaagcagtagccaaaccactaatctaaaagctaatagctaactaataggttgctattagcttttcttttagtatgtgcggagcttactcatacactccataagaatagataagagtgggagggatgctgaaactatatcaaagccttattatcttcttatctatcgtccactatagggatgattctcttagttgggttagggttgttaggtaagtgaagacattgcaatagatcaatcttgcgtggaggtagagtatctacttctgcatcaattccttttatgtagggtaagcggtgaattagtggcaagctaaatgatttggctataccagtacggtcaattaaagagttgtacacgccaattggcacttcataaattttaagctgctttacgaagtcctctgcactcatcttatttgccagctttcttaatttttcatatgaacgtggcgcttctctatcatataagtatccgggatgcacatattcatttccgtagcttatgttcttctttagctgggctggggttaatgctccaatagtaaagtatctgcgtatgtcttcgggatagtgaagcagtagatatctcatgtccttaaacagctgatagtcattatctagtccgtactgtggttgcaggtaggttacttgcaagggggtgaagtaggcattccatgtttgcagcttttctattgcataagtagacatagtagtaagcggtctttctcttgtagggaatacgacaagaggttttatcttgcttttattgtccgttatgcagtgcatgatattaataaagtcatttacatcatgctcactagcagggataactggctggtcaaagctcttactcatacctgtcttactcttatagcgcaaagtacctaactctgggaatagggatgttactggatatgtgctatatctccaaatacctctagtacgtttcatatttgcctgcattatgctgacggactgttcatctaattgactctcttctctagcagggatgccgttcagcaatagtggttgcttcaatatattctttaggtcttggctaggttcaaaggttacgttgtattgagacttattgcttagcttcttagctaatctgactgtctgcaggtattgatcggttatgtgggacataccagtaataaactctgctatatcagtagcggattctgctaatcctgaaaagactactttcaagttggttatttgagagagcatttggaacaagtatatcttatctgatttatcagaattacttactgttgtttgaaacattgtttgaagcattgaagctactttacggtaaacgttgtaatagttagaactctgcgctgatacagaaccgtctgcaatgttcatgaccagtagaatgtctgcttcgggatgcagagaagcaaagtagatgtagttcagcaacttagccatttgtgtcttattaccctcagtacgattatcgaactctacaaagactagatgctgacgaccatttctcttgaatgaaatcatttgatcggctataaagttcagctttctttgttcttcccgtgtgagggatgcttgattgtattgaaccaagaatgggcgaaaatctaagttttgaatatccaagtgcttattaaaaagcaaattaggactattcaaataatccatttgcttagttgaatttagaacagcatttaggtcaagcttatcttcttgaaacatattgattgctttgtaaggcaatagatatgaatcctgcccaattagaagtccaaagtctttttcgttggaagtattatttagaccacctataggttcaactccattggtaaatgaatcattagagcttgaattgagtgaaaatggaacaaagtgcctttttttaggaaacatctgtctataattaatgccacattgtccttctaagcctattaaactgactgaattagaaacaaagtatccttttttagggtacaaaacaccatatttaaaagcacattgttcagtccaactcagccagcgtctaataaatagaacaaaactcttcaaaataggatacaaagtatctttttttagggtaccttgttcatctagccaccccaaactgcccctagacaaaactcttctaaggaaattaattaaactattatcgttgttttcctgcaggtcacttaataaaccttgaatattattcgaaatattggatttaaaggaactttttttatttgcttttccgtttaaacctaaaacaattccattagcatttaagtacgagagagtactcagaaagtctaaacgcttcttagatactaaatccttaaagacatacttaggttctacaatctcattgataacttgtggctctaatgctttacagctattcaaaatattagaatctgatttaagctcaagcccgcttagaacattgttcttcataccgtaaattctgtttgagtctataagccagttaaaactaaagtccatattgtctctaaaggtagcttgaaacattgcttgaattattgtctcaattgcttgctcattatgactatttagacctattaaacttgtatttgtaagaacaatgttcctctgaagcaacaatcgtcttccattcctacctagagtaagaaaagaatgcattgggcgctttgcagacttaagagaatgatagttattactcttaagcaggtgatatgaatcaatccatttgcgcaaagtacttctaggaaagcttagatactcatgctttacagtagaccagagcatatttagctgatcataagtaataaagccaaaacaattgatagcttgtaaaatctgatattgagaatcagaaatttggacattgccaatttgattattaacatgaaaaacaatcatataatttcacctcatgaatacgggaatatccctcgtttaagacttactttacgtataatagtaagacttgagttttgtcccgagtgaatgacttctaaatgcttaatatgacaggaaaagaagaccttttaaaatatggctttttcaaaaatatcagacttgtgttttgtcctttacgttttgtcccaataatttactcaaatggaggtttaaaatgcctaaaagacttaataatctaaaaaattttgacctaaatgaatttgaaacatcacctaaaagaagaaagacctttagctttatttataggctgtttcactacacaacttatagatcctatagaaatcatttaagatttttgaactctttcatgatatttgcagtaattcttatgtttgcagacctatttgcaattaatgcagagcaaatgcagataattggtgcattgttttttgccatatgtggggtgtactcaattgaatatttcaatgtaattagaaaaggttcgcagctaatacaggattcagatcatataatgcagagaattgctatttcaggtgtggttagtgcttcatggcatgtgtatgacggagcataccgtgaaaatgagaagaactctattgagattacttttactcgtgaaagagctgttctgactaatatgatgagaataattagaaagaaaaatattaccttacctttaaccaaagaggatattgaaaatttaaagacgtatgtgagagtagttaatgaatcaggagaaaatctcgtagtttatgggacaataactagtcaaatggcggatcaactcagaaaaaatggaattatgcttacaccaatttctaatcgttatcgtgataagcctttaagatgggattgggcttgtgctaatggaagatggaatgatgctttattgaaatatcctaaatttaaaacttatttgtttagataattagttggtaaatatgaaaacttagagagacaagtgtactatgttttatagatcatgattctatctagatcggttactcattttgtttttgagtaagtgtttgttaccaatgttttaaaaaataatttattaagttgttgaaatgtttcattttgacagctttttttattttttgagtttgcatattgttaaaaatgcaaaagtgtttatgtttttaaaaggagtttttattatgaaaaatcaaagaatagctgttgtaaatttagacgacaagagtactgccaactggttagaagagcatgatgatgcaactgttaaagtgttacctgcagaaatgcttgatggattaatggattcatattctgaatatggcattgatgtagaagcaaatggagcaggctatttagctgatgatccacaattcttaacgattcatgatatccgtaagactaatagttccaacggatcaaatcaggcacctaaatataatcctgtaaatacctttacttctgaagacggcattgtaattgctcatgttattagttcaatcaagcgtataaggactgaggatggtcaaagaaaagaaataacatcatgctacccgattatggctcgtagtgagaggtcaaaaagatatttggctaaatttcataagggtgattatgttgtatggagaggaagcttaaattcatacattttaagagatacgaatggaagttatactaatcagactacttactggattaatttatctttcttacatggaagttggaatcctacagtaagaaaatctgcaagaaatctttcaaacaattctctaaaacctaattatgaagattctaaaaattatgaagaagttatttctgaaagtgaagctcactcacaatcgacggaggatcaaaatacttcacgtttaatttcttcatcatcagttccaaatacagttgaaagtagtcaaactcaagccagtccttatcctgattatcagcttccaaatgatcctaatgatcaaattcagcctgatgagcaagatagtgagcaggtagatcaaaagtcaaatcaatctgagcaagaacagcgtcaacttgatctaaactttaattcagcatctacgactaagaagtctagtttttctaataagaagcaaagtaaatctaagggatattcaaattattcttctgaaaataaaaagaagaataaaccaagatctatcaaagcttctgattcaaaagaatcaaaagatgctaaacagtttagtttaaagactgatgatcttaactatcagaaaaagtctaattctgaaactgatgtgaaagatcaaaataaagttgagatgagaacactgaatgctcaagacatcaactttgatttctaatgataaaggcacatgggaattaatcacctgtgcctttatttttttgctcatttttgagaaacaatgaaaatgaaaccacgatcaatcattaaaaattaaactccttaatgatcggaggataaattttatgattgacggacttaataactttacattggattctgtctccaagatggagcaggaacatctaaaagcattttggcaaagcgatgatcccactctaagcgatgctattaactactactttccaatatttttagcaaatgtaactgctaagaagaatcagaagtatttgtcattaagtagtgatgataaaaacgatgtagttagggaattaaatgaacgtttccaaactgctatgaattatgcgtttattaaagggcaccagcaagtttactttataattctgccaaacgtattaacaaagataattttcaaaaaggattcctttgaagatcctaaaattcgctcaaggtttttaggtagattctttgccagtctgccaactaaggtttatcaagagctgattactaaaaaagatatctttgaactcatgaagtactgctctggatattttgaaaacagtttaagaatcattactgatatgagtaagatattttttactaaaggagcttcaattgcctacgatgaaattagaagggatgtagttaaggttgattatcatatcactggctacagcaagatgcttaatgcaccgtataaccaaagttttgatgttactccctcgtttgtaggtacatttgatgtcgaacacctagattatgaatcatgggacatccgatggaacgagacttatagtcaagatttacagaatactttagtaggaaagctcattgttaacaggtttcaacctgaggaagtcaaagcatatgcaggcgtcggagctgaaacatatgaatcaataaaccaattctatgaagtaaatcggagctatcaagatacagattcaaaatatctctatcaggctcaaatgatttttgctatgcctgatggaattggaagtactagagcattgatacctgaagaatatgagcatattaagattagtttgagggataccttatgccgaagattacacgtacgaagaaacaaaatcttcgtaacaatttaaatataactgatggtatgaagattaataatgacgatatggtcaaaaaagtattattaggtatggatgaggagctggctaattatgtaaatgatgcttttaaagatgaaactaagaatttaagtgcattagtcaatgttcctgttcaggttcttcatgacagtaaaggtgtaattgaacgatacagcccagatatctatttagtttctgcagctaacgttgtttatgacactgacgataagcaagaacaagaattgcttgatacgctttattcaattagtactgatactactttgccacctgttagattagctgttattgccgataattcaatgaatccagctatttggtctaaaattgctatgttttgtcatgacatttttcaaccagataaaagtactaatgagcttgatttgtatgcaatggctgaccaattggcaaaaaagagcaatatttctaatgttgagcagtatttgaatatgtctgatggcgtgggcaatttgggtgtgaatactaataatgatattattgctactcaaaatgacgaatacagaagacgaatcaaggaacttgaacgcattaatcgtatttttgctgagcatagaaatgacccgatcaactcagggatgactaaacaagaatcagatgatttgcttaaaaaagcccaaggtatagtcgatgaaggtgtcgatgatcaaaaaatcaaagggctttttaatgacttaattcaaagatatcaggaaaaggaaaatcaattaaacaaagcaattaagagaattgataaccaaaatgattcaattgatgaattaaattcgcacatctctaatcttgaaaaaattaatcataatcctaatagtaactatgacaatcagggcaattataatgaccaaaatcaatacggttatgataatgcaaataattataatggaaatcctaacttggataattcagaatatcaagaatacaatcaaagcaataatccaaatgatttctataataatgattcctcatatgacaatggcaaccctaatgatggataccagaaccattatgataataatacccaaaataatggatatgactctggtcaagacttttataacaataaccctcaaggatattatgatcagacaaatagtaattatgacgatcaaagtaattactacgctgacaataactttgaaaataatggcgactttagaccatataacgagcaagatagcaataataactttgatcagggtaattatagccagccaccgtttgacggctctaaccctccaaatgagggctatgatgcaccaaataactatgaggatgactatggatcatatcctccaaataatttagatcaaaacaatcctactgatcagattttgccttccacaatggtattaggtggtagacctgctcgaaagcctaaaaagcaaaaaaaggaattgaatacaggcgccatttctaaatttttacaaaagaataaacgctgggctgtaataggggttggcttgctagccgcaggtattattttaggtacagtaacagtaattaatcatagggcacaatcaaattctcaaagcgctcaagttgcaaaacctagttttaattcattaattaaaaagggtaattatgatcaagcagcggaagattatccagatagagcagttgaagctgagaacaaaatgctggatgatagtgacgtttctgataaagccacctttgcaagtagaattcaaaattatagcaaatcagatgctattaaatttgataatttttattttaatgaaaagtataacgatgccgtagacctattagataattcagatgatgataatctcactcatctttctaatgctagaagggtaatggctgcatatagtctgatgaagactggcgatactactcgtgcagagaaagaagccaaaccactagataatagtgaactgactaagaagattcagctatataagcaattccaagatagtaataaaaagctggaggagaagatcaagagcggaaatcttagcgacagtcaaaagtctgatgctaagaagatgatccgtgagaatgagaaaaatatggataatatctaggaggtttttatatgtcattagatgaaaacaatgctgacggatttaacaatgttaatcctacagcacgcccagatagaccccgttctctgaatgatgatgctcaattaccaccacaaaataatcaaccaccaaaggatacttctaaagctaaaaagatcggcttaggtgttattggtggcttagtattaattggcggtgcaggtttgacttttaataagtttagtcaccatccaactactcaaactactactaaaggacgagaagacgcttctaaggatagtagtttaggatttgaagataaagagaataaaaagggatctagttctaagtcgcataaaggcgggaaggctgaaaataatctgctgaatttgctggattcaggaaagaagagttcatcttcaagtaaaggattggcttctaagctagataatttgatcaatggtgaatcaggcggtaaatctggttcagctaaaatggctagtttagcagctgacgttgaaaaatcaaatgacttgattgcaaagctggataaagcttctggatcagatagctctaaggcacctgctcttaagcttgatatgtttggtaatcatttggagaacttaaatgaacatccaaatgacaacggcagtcgtgtaaaaacagtgtctgctgccacattgccaaaatcaaaagtcgatgttattaattcaagcactgatgttaagccaatagaatcagataaaaataaaggtacgcataagactttggaagttacagattatccatctgcagtaattgacgataatgtttcgcatactggttctaaaggaaaggattctaagccttctaaatctgattcaggcaagaagactgattcttcttctgaaagcaaaattccaactaaacaaggcaagtattctaagatggttactcttattgatactaatggaaagaaagtaggcaaggtcaaattaacttacgttgttcatgcagacggtagtgcaactccttcaattaatttacctttgctttacaatttgactgattccaatgaaatgaatagctatccagatactttgactgtttcaagaattaccgtacctgttgagcttcataaagacgttcaattagttaaccaatatggaaatactgttggaactatcactttacacagatacttagatccaagtggctcatacagctctccttgggaaagtggtgatgtgcctgctggtgttaagattaattggaatgatatcaagaagtacccagataagatcaaagtattcagttcacctactgtagttacaaaccaaggtcaagctgatattaatgaaaatggtgatttacctaatgaaggtactgctactattgattccgctgctaatagtgctcaacaaagtaacagtcaaaatcaagatactcctttgaaggcaactttaatgagtaatgctgtcaataaggtagataagcctaatgaaaatattcattctacaaaagctaagcatcagtctcaaaataaagcaaatcaatatctttcctctcaaactagacttattaataatggtcatgacttagcgagaactgaaaaacacttggaataatctatttagaaactagtaccaaaaagccatcacatttactgcgatggctttttttgaaaggataaacatgacaacttttattttagctgaaaaggaaaaacaaggcagatcttatatggatgccttaggtattaaatatgctaatgcccattctgcttatggtagaggatcaacctttcttgatgatgatactgtggtaattggtgctgaagggcacttgtttgaattggctgaacctgagcaatatgatcctaaatataaggatcggcttgatctaagcttattgcctatttttcctcaacaatttaaatatgaaattagaaaaaatttaattaacagatttaatcttattaaaggtcaagctaaccatgctgatcgtattattgttgctaccgataaggataatgaaggtggtgctattgcctttaatatcttgcttatgtccggagttgttggcaaaaaagatattgttagagcataccccaactctttggataagccagcaatcgttcgaacatttaagcatttggagcctattcagcaaacttggagggatgctgatgctgctattgcaagaggaaagagtgattggcttattggaatgaaccttagccgtttatatacctctaaacttaaagatgttggtatttacggaaattttgcagttggtcgtgctatttcctcaactttaaaactgatctgtctttggtatagagctattgagacgtttaaggaacagcctacttattctttaaatgctaaaacaaagcttcctaacggttccattattaagctgactagtggtattaagactgttggtactgataagactgaccctaaagttgaaatgcataaagccttaaatgaccaccagcttaaacctaaaatgtatggcatagtgaaggaatctagttcgtctcagaaaaattcttatccaaccaaactattaactaaagctggactttatacagaaatgtctagagtagcaggctggtctcaaaagaagtctgaaaaggtaatgcaagataattatgaacaggggtatcaaacatatcccagaactgattctcctaaaattactatggaagactacaaatacttgtgtgctaactttgacagttatatgtctcacctagggatgaaagataaatatcagttatataagttaccctctgataaactttctaaatatttaagtaaagaagcatcatctggtgcgcatacagctattattccaactcaaaaagttatgcctagcaaggaagaagagcaagagattatcaaggatcttaaagctaagggtaaagaatcagattatacactgattaccgacgatcaaagaattatgtgggaagtagtaactagaagaacaatgaccattttgctaccgccttatacttatatttctaataagcttgttgttggtgctaatgacgttgatttttcagttactaattctgcaatgctaaataatgggtggaaagatattgttttacctaagaatgctttaaagaaggggagaaagtcttctgctacaaaaaccaaaaaagaagaaagtacctttgattttagtaaggtagtacataaagacgatcaacttcctttgattttaaatattgaacaaggtaaaactgttaaacccaagccattaaaagatattcaaatatatggtgataatggcttaatggaaaaagcttatgaatatgttgatgaccctcgtttatcaaagctccttaagaaggtacaaggtattggtacttctgccacaaaagatacgattgtagacagtctggttcaaaaagaatatataactttgaattctcaaaacgttattactgtcactgctaaaggatggcttatgtatactttgatgaaaaactctttggtaagtgatccaagtttaagcgcaaaatgggaagcgtactacgatcaaatcagcaaaggaaaagctaacgctcaagatttagtcaatgcaactgccaaactaatacttacagaaatatctcgtgtaaataagaaatggaataaagacaaaattactggttactatcaaaagcgtcagcaaatattcaatcaaactttaagtattggaacatgtcctatttgcaataagggaaatatggtctatgaaaagtttacaggaaaagggaaagacggaaccaacttaagtacttataatggctggaaatgtgataatccagattgtaaattcaaaatatggcagcattttgccaacatttcgtttactcagactgatgctaagagattacttaatggtgataagacaagagtgatcaggggcattattggacaaaagagccataaaaaatatgatgctgcttttcaattaaaacaaaacaaaaagactgggaaagtaacagtttctccaatatttgaagataaatgggttggagagaaaaggcgaaagaaaccaagaagaccaaattcattgaaaaacttttagggctgattaagcaaggataccccacgattttaatctggggagtattgcactttcagcccctttcttttttattcactagtttacttatgatataatttatagtgaattaatatggaggaggtggattaagtggatcagacagtaactatcaaggctaaactgctcaatattgatgagaaaaccgcacagacctttcgtgaccttagctggctttggtatccgattaagtttaagcgccccccaattagatttagagagcaatcgggattggtcctacctaagttccactaagcaaatatctttaaacaccctgcaaggaaaaaaagttgattttgtatgcaagggatttaatcaataccttgatattaaagaaaactgatttttttgatatataagaaataatttaaagtaaaaaatctattttatatttagaaatgtagagactgtcaagaagtttgtgtaaataatctctctcgttgattgacttttttatttatcttttaatcaaagtaggattctaaggtgtcctgaacctgaccaaagcctttatgaattcgattgaaataacggtcattgtagctcattgcctgaataccaataaaagcatcaagcgactgttcagttggaaactctgccttaggcttagctttgcgcttgatcacattgttaaatgattcaatcatgttagtcgaataaattgaagctctgatctgcttgggatagttataaaagaccagcagatctggttctatgtctttcaagcttctgataacatggctgtaaaccttgccccatttggtatagaagtcatgcaggacagctgtggcttcttctttgtttgtctgttgatgcacctgtttgaattcgttcatgatcttttcacgatcgtcgacgcgtactttagcgcagatattgcgcatgacatgaaccaaacagcgttgaaaatgagctttaggataagtcctggccaaggctgttttcatgccaacaacaccatcagaaagaaagagttcaacttgcttcaagcctctggacttcatgttttgaagcatctctgtccagacttcaatgttctcactaggagcaatgcagtagtcaatgacttccttatgtccattaggtttaatgccaatggcaatatagactgcttcacgctcaaacgtttctcggcgcaaaggaaggtatgtcgcatccaaatagacgcagaaaaacttgtcgcttagcttgcgtttgtggtaagcctcaacctttggaatcatctgcttggaaatatttgatacctgagctggactgtaatggctgccatacatcttttcaattagatcggctatttccctggtggtcacgcccttggagtaaagcttgataatcatgctttccaagatatccgagtgctgcttgtagtcaggcagcgtgtgctgatgaaattgaccgttgcgatcccgaggcacttgcacttcaattgggccaaattgcgtatcaactttgcggaaataagcaccatttctagagttgccagtattccagccatttctggcatagggatcatagcccagaaaggcagtcaattcagcttctagcaagttattaacagcctgttgtagttctttgcgcaataaatcatttattttgtctggattgaatagagcttgagcaaaatctttggtaaaatcattcatgaaggagttcttctttctgtatgtgttttttttgttcaaaccaatcatacgagaaaggaactcctttttctaatgtttaaagaaataaatttaaggaatcattcatccttacacaaactattttacagtctcgaaatgtaaattattacaagttaagttgaaggagaaaaattatgttttgcgttgttggaactattgatagtctttctgaattaaaaaagggcggtcaaaatggaactgagtatttacatgtgaatattgtaaaacatactaatcggggaaacagactaattcctattgtattttttgggaatagagctaatgtattaaatcaaaatgctaaagctggggattgggtattagctactggttcggttagtggacctattgcagaagaaaatcctcgttatgtcaatgcttcacttattggtaataccttaattagacttaaagataataaggatttagaatctggaaattcagcctcaaatgataatgcttccgtaaagaattcaacattccatgatgatttaaatagagaagcacttgatgcagatgtatctaaagcagttgaaaaggttgcaagtggtggttcacttcaagtaccagataagggtactaacactttaaacatgccaaatcaaagtgaaaatattgtcacaagcaaaaaagacagtgaatcaaatgtagcaaccacgtctaataatgataaaataactggcgctaacaatgggaaagatacattttcaaatcaaaatcagagtcgaagtatgaatgattcaaattctgattctaccgagtttgatgatatagattctaaagatgatgattggctattctaaaaattagttatgttttagtacccaaaggagttgaataatggaagagtacacattaggggctttagttaaaacgctgaggttaggaacaacgtcagcgcttttagaaccgtttaaacggatacttgaccccgtcatggaggatgaagtatattctgacattccacgaaacgaaattgttagagtaattaaagttcttaaaacgggagatttagctgaacgtaaatcgtttgtaatcaaaaaagatacttttgattttgttagtgatcaatataagttaagtaaagacctaatttcattgagtaagtttgctcgtgaaaacgatatttactataaccacttgcgtaagaatgtagctttgtggcatgagcaacgtccagaaatcttttacaaattctttgaatataatattttttattcaatgaagaattactacttggtaaaatctgagactaaagattttagaatatactatctaggtagtttgattaataattgcaataagatgagtgagatggttacaactactaatgtggcatacactacggcagctcgttgcatcacagtcactctactagagcaagtgcaagacgaaacttcaaccaaaggcagagttctaggctttggaaaagatgctcgtaggaaaattacacctattgttggtttttacaatggtgatatccaatttgcacctgttctgcaacattctccgagatcatcaggttctttaaagtttaagacaacacaatccaataaacgaaaggttgttttaaactttcttatgagtgatttactagataaaagtaaagaacaatatttcaatttattcttaagagccttagaaaatcgaaatgtcaaaattgaggtaaatttaaaaactgaaaatggaaagataaatggacgagcaagagtaacattggactcttgttatctcaatattgataatttagatcgtgatagtaaagacaagactaatattaaacgtgaaaaagataaggcttatggtcgtgttggcgaaataagcaatgaagaatttgctaaattctttaatgatagaacagatcgtgattctggcagttacgttcaggtgaccaaaaataataaaaagccagtttattttggatctacattatataatgtcaaagttccaatgaactctccagaaactatgatgacgatggagcgtattgctcatgaacgtggtatgtcaattagtgcatggatgagctttttaaccaaattaacagttaatactaatcaaattgctcaacttgaatctttctcacgtgaaagagaagaggatgagatctacaagcaaaatgccagagtgggtaagcaagttcttgagcaacatgatttatcccctgaagttgctaaagtttcaaaagcaattactaagcaattcttagaggtcaaattaaataaagatactcttgataaaaagatcatggctgatatcttgaatcacccgttagtgaactatgaattggccaaaataattgaaaaagaaaatcatgaaaataatgaccacaaaaaaatttcggggggggtaaaccctatgtacagagcggagttagcctactttgctctgtttttttattcaaaaaaagtgtctcaaattatagacatttatttaaaagcatttataataataagtgacgaggaaataaaatatgaaaaaagaatacttatctttaaatagcttagaacgagcggaggattatcttaataccttgcaattacagagaaaaatacgatcctattctaaggacaatggaatctctagagctaacatttatagggtattggatgaaaagagaaattctggaatcgcttggcgaactataaataaaattgccacagatggtgaaaaatatagaaaagaggcaatacttgatggtcaagattttgaagttgctaaaacaagtgttaaaaattggattgatagactaactaataaacgaagtaaagacaacagaattttaaaaaaagtgattcttgagaattctaatgttttactagaagtttataaatatttggaggaaaaataattatgaaagatgataaagatgacatgattaccttggaagaatttgctgaagcagccaagaagcaaagaactttaacagaatggattttggaattaagtatctatcttcaaagttttcagggcttttgtctacaacgctggtttttgttaaacagtgatttaactgatgaagaatttcgtaagcttttaattgttttaattcaggaaaacgaaagtcttattttgcaaaaatgggcactaatgcaaggcgaaagaagtaatttatatcaaaacaacattccatgggacgttgtagttgatgctcaaaaaacaacctatgctgaatttaaaaaattagatattgatgtattaaagaagcacaacattggcttaagctatgagaaatttactgaattattaaaaacagatttaggctatgaagaaagactttgttttcaaatgcttcataataataaagagcttagaatacctacaaatgtcattgttggtagccaagaattaacacatcaagaatttatgagcttagatccaaaggtcttggaagaaaatcgtattcgtcaaaatgatgatgattataaaaaattgatgattatgaataccaagaaatatatattctttgcggaagaagttttaaagggaactgcttggtaaagaacttgtttatgagatttaaaagattatataagctatttgagttatggttgtatactttcgctagaggtgaaactcaatggcaaatcaattcattttactaagcgaaaaaagcatagctaaggttcatgaagcatttaacaacttattatctgttgatgatatatctactccaactattagacttctttcagatatgggcttctatattgacggcaaattagaagatggtaacgtttatagacttagtgttccagacagttctgtcaacatccctatagacgaaaatgtatatcatattgatacaaatgtaaaagataaagaagatgtaatggctattatggcttatttagctaatatctcgcatactttgcaagttattagatttgataatgatgatgatctatttaaaggattcatcagagacttagaatctaaaagagtggcttagtatatttaaaaagactgtaatattaatcaaaatctttatattggaaaattgattaataatacagtctttttttactttgaatattattgcaataaaaaactgatcaatgctgttaaacagaagatcagtttttatttctatttttatcttacactacctgcaaagcttggtgtgaaggcactaatagattgaatttgaacattttgtcccggttgtggtgcttgaacatattgaccattaccaatgtaaatagcaacgtgtccaatatcgccaccttcattccagaagagaaggtcgccgggttgtgcttgagatactggcttttgtgttactgcaccggcttgtgcttcggaagtacgtggaatattaattcctgcttgagcatatacgtattgagtaagacctgagcagtcaaaaccgctcattgattcaccgccccaaacgtaaggcacaccagaatttgcaatttgagttgctaagttgacgatcttagcagcagttgtgttgttaattgatgataaagttgcttgtgcgtttgaagtagtagtttgcttggttgctgtggtggtcttaactgctttagcctttgatggtaaagcaatcttttgtccttcttggattgtggcatcttgccaagttaagccgtttgcgtcaagtaagtcttgtgttttaacaccaaccttttgagcgataacagaaatgctttcacctttcttagctgtaacagacttaggaattttgattttacgaccctttttaagttgttgattaccttgcatatggttagctttggcaacagcttgaatagtcatatgttgcttattagcgatatcctttactgtatcaccagacttagccttcacagttgctgcatgagctaccgtagatccgactgaaatggttgtagaagcggcgccacccatgaaaagagctgagaggattcgtaaagcgttctttggaaacattttcttcttcaatttaattgtcctttcttactacaaataaatcattgaacatttttacaaatatacgatagctaaaaataatatttacagcatttccatccttttcaacaacttcagctgtaatataattcaatccgtttttatcaatgccttgtctagcaaatcttacgtttagttctttactagaatcttctaattaattaacttgatgattgctattaacgaaaaagcttttagagtattcgtttatgttttttgctaataatctattagcaattttacgtccttttagagtaatttcaggcgcattaattaatattgcaaaaggaatattatattgatcaatacctttaagatagagaattctcttattataattggtcaaatattttgtaaacggtattgaaatataaaaacctaataaataagataaggctttttgcaatctcaaatagttaatactttttaagtctaaatcttggaaaagagcttgtttaacaaaaagcttgctcttttttctcaaaaggcaatgatgatattttgaatcattaactgcagggaacccgtctaaattttgttttatatgcttagcgtaataacgtccagtagctttaccttgattagtacgagtagctaaaacgatttgaattggattatgacagtaaggacatattgcaaatatcttttcaccatcatgatatggggattcggaaagatatgactgaatatttttaggtgttaaataaaatctcttatctagcatcccttttacagtaaaaatatccattcaaactaccttctttctcatatctaactaaaaagatatatcaaaagaagactaaatgaattttgacttttagtgtcaaaaaatgagcttctaatatacccacaaagcatttctagaataaaaaagaaaaattagtgtgtgaatgagacttatgtagactaacaatagttaaaagtgaaagaagggagcaaaagatgagaaggggcaagtcgttagttcgtgatctacaagattcttcggatggtacagctgcttatgataatgcggctttggtagcggctaaagatgcaatggaatttgcttcgtacataaaggatgtatgtgaacaaagcaatatgccatataacgctgtattaaccgtatatttaatgactgaaatgttaaatggtgggaatgatcaagtaataagcactccagaagcccaagatattgcaactaaattaaccaatgatttggaggggctacccgtcttttatcatataagagtttttaagttgtttattaataggtattacttaaaaatcatgcctaacgttatgggaaataactttagtgaagatgaagcggcactaagcgatatcttgattaactctagtaaagatttcaaagacaatataaacagagagccatcaccatttgagattatctatttggtttgtcaaaagttttatcaaggaaatcataatcagttttcgcctcgtgattcgagggtaatacgcaaattcttaaatgataataattgtcaaaaagcagttttaaatgactacattgaaaggtttgcacaagattttgaaggtaaaagataaagatggacgttagattaacaaaaagaaaaaacattttactggtactactaattggagtcatttcagtaatgctttcagcgtgttctgttaagaaaataatgccagctaaggaagcaacgcagcattttaatactgtgacagagtcattgctagaaactcaaaaaatagttgaaaaatttggtgattcaaagaaggctaaattaagtaaaaaagatatgcaaacaatttcttctagtcaatcagctattcaagatgcggagaaaagtttagctaataccaacgtgcgtatgggttatcaagcacaagtatatgattacagcaaagcagtagataagtatattagtgtagcttcagataatcccaaagacgtaaataccttaatgccaaagtatcatgcagtagttaagaagatgattagggtctataaacagatgccagaaagcgccaagtcctcaaagaccgataagctaattgacactgttgaaatgatggatcctacatatatcaagcaagcaattaaagatcaaaagaagaaaaataaagaaaagagtgcagaaagtgcatcaaaaattaaaggtaaatcaattcctactggaacgacgatcttaatttttattctttcaggcttattgattattagtgtgtttatgcaaccgtcaaaagcagacgatcaaatgaatgccttaactgatactgcaggtgcaggattaatgaatgacaacaagccacgtggttatgctctttatatgatgagaactacagaagtttgtttagcattgttagttattgtgttattgattttagaatttaaggattaacaacgatggaatacttagataaggttattcaaacacttaaagaatgtacatgggaagatgctgggaaagcatttgcaaatacaggcgtcatgctcctactaattgtcgtaattgctattgcgtatgcagctatggatagcgtagctaagggacttttaaaaatttaaatttgttaaggaagtagggctaaatgaatttaagaaatttacttgaaaacaataaatttaaaataaaaaagctagaaaagctcgttgataaggtagattcttatgcaccaacagtacggcaactatcagatgctcagctaaagcaacaaaccaatgtgtttagacaaagatatcagcaaggcgaatcacttgattctatgcttccagaagcctttgcagttatcagagaagctgataaacgtgtattaggaatgttcccttacaaagtacaaatcatgggtggaattgtacttcatcaaggtaatttggctgaaatgagaactggtgaaggtaagactttaactgaaaccttaccagtttatttaaatgctatcagtggcttgggtgttcacgtaattactgttaatgaatacttaagtaaacgtgatgcggctgaaatgggacaagtttatagctggatgggtttatcagttggtgttaatacatcagaaatgggcgcagaagaaaagaaacacgcttatgcctgtgatattacttatactactaactctgagttggcatttgattatttgagagataatcaggcagtttataaggaaagccaagtacagcgtggtttaaacttcgtaattgttgatgaagcagattcaattttaattgatgaagctagaactcctttgatcatttctggaccagctccgtcctataagaccttatatgaatcaactgataactttgtaaagactcttaataaaaacgactacaaaaaagatgaagagaccaaagtcgtaactttgactgaatctggtattaaaaaggctaatgcatattttggtatcagcaacctttacgatgcaaacaactttactgttgctcattatgtagatgaagccttaaaagccaactttgcgatggatattgataaagactatatcgttagaaatggcgaagtaatgattgttgatacattcactggtcgtgttatggaaggtcgcagattctctgatggtcttcaccaagctattgaagctaaggaacgtgacagaggtgcaactattcgtgatgcggatagaaccgatgcttctattacttatcagaacttctttagaatgtacaccaaattagcaggaatgagtggtactgcttcaacagaagcaaaggaattttatgagacctatcatatggatgttattactattcctactaaccgccctgtacaaagaattgatgatcccgatgtattgtttgcgaccaagaaggctaaattctatgctgcggctcgaaaagttcaacaagttcatgcaactggtcaacctattttaattggtactggatcagttgaagattctgaatatctaagcaacttacttaatcgttttggcttgcaacacaccactttaaacgctaaaaacgatgcaaaagaagctgctattgttgctcaagctggtcaactaggtgcaattactattgcaactaacatggctggtcgtggtactgatattaagctagaaccaagagctaaagcagctggtggtctattcgtattaggtacagaaaagtttgaatctaggcgtattgatgaccagttaagaggtcgtgctggtcgacagggtgatcccggacgaacagaattcttcctttcacttgaagatgatctggttgttagatatggtggcgaacgaattaagaaggtaagagacagcattataagaagcggttatcaaggagaaccgctagaaagtagattagctattaaggcaattggctattctcaaaaggttgttgaaggtaataactttgatgaaagaaagaacacgcttcgttatgatgatgttttaagaattgaacgtgaaaaggtatattcagaacgtcaaaaggtaattgattctcaagagccttatgaaccatatctaattgcgatgtttgctagaacaatcaatcgccaagttaataaatgtcttaataacaacaagcaaattgctaatgttgatgctttctcacaatttatgggatccattatgggaattaagaacccacaaattattcagcaacttgttaatgccaatgatgaagttgccgttaagaattggcttcttcaatattccaagaacgaaattaatagaaaagcaagagcgcttgtaaatcctagccaacttcgagaatttgaaagagttattatccttaaagcggttgatactgcttggaaggacaatattgatgtaatggaacagttaagacaaagcattactcttcgtggatatggtcaaaagaaccctctgattgaatatcaaagcacagcacatgaaatttatgatgatatgctggcagaaattgatagagacattaccagattgttcattagatcaagaattgaagaagaggggagagcaaaggatgaaaaagcagaataatcaaaatgacattcaaaagagtagagacaatcgaacgttaatcaaacggatggcttataccatttggatcttgtttatttaccatttgctatcttatgtaagcatccccggtgttaatattcatgaaatgagcaagttagctgataatagcagtttaacaatgcttagtatgttttctggtggtgggtttgagaccttctcattgatgtcaatgggtgtgtctgcatatattaccgcacagattattgttcaactgttgcaatcagatgttgttccaactttgacccagtgggcaaaacaaggtgaagtcggtagaaagaagcttaataacttaactagagttttcactttgttttttggttttggacaaggtattggtattaccgctggtattaaccaattaacaaaatcaggctttattctaaacaactcggctctttcatacattttaattgctacattgttaactgctggtagctttgtggcaatgtggatgggtgatcaaattactgaaagaggtcttggtaatggtgtttcagtaattattactgcaggtattattgctaaaatcccagatactttaatgaagacttttaagcatttcagcccttcttcaactaaaaatcttatgggcgcagcaggtgtcgcattattggttgtattgtttagttggttaattgtttgggtaaatgatgcagaacaccgtactccagtgcaatatgaacgtaagagttcattaattggtgaacaaagcttcttaccattgaagatcgttgtccccggtgttgtaccaatcatctttgcaagttctttgctgtcacttccacaaattgtaatgatgcttttcagaagccactataaagatacttggtatcaagtattagggcagttcttaacgatgaatactattactggtattttcctctacgctattttaattattgcctttacgtatgcttattctgtagtacagcttgatccagataaaatggcagacaactttgaaaagcaggaagcttatccatttgtggaacccggaaagccaacggcaaattactttaaagacttgctttatacattagcattgcccggttcattgtttttggttttgatttctgtaattccattggtaatcaccaactttatttctccaaacctacaattaggtttgagtggttcaagcttgctaatcattattggtgtatttactgatattggaaatcagatcagagatttaaagaccaaatcagattaccccggatttttgaataagaattatgaatttgactaaaaaaatgtttttcaaatatttaatgatactatttgacgtgacagcagtcatatgcattatttatgttgggttagcttttgatagatttgaaacagacttgcatagtagctcgtataaagagtcaattaacgagcctgatacattaaccataatttataatcctgactgtccaagatgcagaagcgtgcttcctagattgtttttggcacatgcttttgatagcggcaatgagcatattttggaagcacataaacttacatctgatcaaaagaccaatttaggcgaaaatctattaccaacgtttatttataaaggagaggttttggaaacaaccaactactccaaaataaataagttttggaataggtcacaccatagttggttgcactcaataaatagaaagtaactatataggaggttttaacaatggcagttaacattattttaaataagatcagcaatcaagaaagcttaattacagttcatgtgaacgatgacgttattagatggaaggctactagacaaaaaggcgaggaacacgttgttaacggcagaactttagttgcttattctgtaatctatcaaccattgtggattttattgattaagaaatacactgattttgatgaaaaagatacagaacatggtttgcctaagctaaaagaaatctttggtgaaagagtttttgacagtttaaaggcagctaatgattttggagaactggttgttcaacaaatgagcaagatgcaattttcagataaattgaagtaataacacagtaagctggataaattaactaaatgctataattttcatcgaaaaacttttagggctgattaagcagggataccccacaattttaatctggggaggaattgcactttcagcccttttctttttatttattcattagtttattttgatataattaatagtgaattagtacgaaggaggtggattaaatggatcagacagtcactatcaaggctaaactgctcaatattgataaggaaaccgcacagtcctttatgcaaacaatgatcaaatataaggatgcctgcaactttatttcacagtacatctttgatcacgattttgaattaaagcagtctaaactgaacaaggcgctttaccgtgatcttagaaataagttcggcttgaaaagccaaatggcgcagtctgctattaaaaatgtcattgcccgctataagacagtcaaaactcaattaaagcaaaagccctatcgctatgataccggaagaaaagacggcaaggatcatgctatttggtcgcaaacctttcgtgaccttagctggctttggtatccgattaagtttaagcgcccccaattagatttagagcgcaatcgggattggtcctacctaagttccactaagcaaatatctttaaacaccctgcaagggagaaaaaaagttgattttgtatgcaagggctttaatcaataccttgatgcagataaatggaaattcggtacgattaaactgcttaaatttaaaaagcagtggtacatgcacctaagcgctactgtttccctatcggaatatcagcctgaagaagccgagcacgttgtcggcattgaccgtggcttgcgctttttagcctcctgctacgatgagaaaggcaagactttgcttttcagcggtcaaaaagcattaagaaccagacgcaaatataaaaaactgcgtgcccagcttcaagctaaaggcaccaagtccgccaaacgaagacttaagcagatcggtcaaagagagaaccgctttatgagcgatgtcaaccatcgcttgactaagacactcgttgaccattatggcgctaatactctcttcgtgttggaagacttgaccgatgttcgcttcgctacggaaaagacggctaaggacagacgctatgaaatggtttcttgggctttctatcagtttgaacagttccttacctataaggctaatttaaactcatcagcggtagtaaaagttccagccaaatataccagccagcgctgtcctaagtgcggacggattcgcaaggaaaaccgtgatcataaactgcacttgtatgtctgcgataaatgtggctacaagtcaaacgatgaccggcttgcgtcaatgaacatccactttttaggaacgctgtatcgtagcggtgaggaagcaccgcagtttaacaaacaagcatctgccgagtaaatcttggcagataaatgggcatcgtcaactgtccgatgatgtagtctcgaaggtgagagccggaaggcgttaagatcactattcccaaaggaatgagaactacaaaccccagaattgattctggggtagttgattattaggctttgatggcactgatgatagaaagtatagaaaaagttacagaagactagaagtaggaaatgtagatgataatatttctgatttccttgatgaagcgtgaatttgcatttgatttagaattactggaaggggcggtaaaagaaaaggatacagaccttgatttgattaagttaaataaggaactacaatgcaaaaataaataattagctaataaaaataaagaagcatccctcatgaggagaagaaccgttaaaatgagttccttcttccttatgttgttagggatgcttcttttttgtggcaatgttttaggcgctaatgcaatcattttttactattaaatgtaaaaaattaacagcctgcacttgaatataaacttaaactaacaagtcaaaaagtaaactataagaggtaaataaaatgaacataatgaatgctgatgatttttactataatgccttgttaggtagtcaaagacaaagcaaaaatgctcttaacttgtctaaaggcaagactaatgttttttggtttgaacctaaactatttactagtgcatatgctgatcttagcaatgtagaaataataaaaactaaggcagaatttctaaagggtaactttaagaaagcaggcatccctgttcctgtgattgttgatgaaaaagactggctatataaagcagaatttaagttgtttgatcaaaataccaatttagttatggaaacagaattagatgatattaaattaggtcatgcagtccccaataagtcatatttaactccttacgtgatttataaacgtaagagatattatggtgtgactgtagctttcccacacttaaacgaaggcttatataatctttatattcatgagcaatggaaatctccatttctttcatttaatattcaacgcaagcttaatattccttttattgttagtcctgactatcaagaatacaatcaaactattgcaaaccctaatattgatgataaccagcctatttggtcaagtaagtggtacaaagatgaaggcgatactatttgctaccttaacttactagacgacattaacagagagataggaatcaccaaagtgggagactttaagaagattggtactcaaagtatttctttgaatcaagacttggttccaactattaacatcaatatgaatgatggcattgcatattcaagctggtacggttctaatgaagaattaaaggattcctacttaacttattaccgtattccaacatatttgactaagaaagttaaaaaagaaattaatgacttgctcactattgataaatgggcgcctttgaattccaatatggttaaaggaatggtagcagctattgtaaatgcacatacaactgagtataagcgtcaactagatcactctggcgatggtgtagttaagattcaaagcaaatttcatgctggagtaattaatgagacctgttttactttaggaatcacttcaaaatagaaatgctggtaagagactatgaataaaaagccaataagaatagtagtctttttggcattaatggctatacttatcggtttgttatgcattatttggaacgataagctaatactcttaagcaaatcggcaaataatgatgatacaggcagattcagcaaggttatagtcaattatgctaatggtaagaaaaaggtctttagagacgctactgttagctcatatggcgatgacagaagtgcagctaataatcgagttgaacttcaaaaagacaaaactattgtcattttgcctaatgacactgaaattgaattgactaaatagatagaaaagggggaaacgccaatgtttttaacaacagcgattcacacattatggactaatggcgttgctatgtcattaattggggctttggttggtgcgatgctttttagctttttctattttgcaattagagctattcaagaaaagaatgcagttagatttggaatttttgcagcatcctttattgctgtgtttatcgtattaatttgtattccgattgttcctgatttattaaaaatactttttgcttcactaagtacgcttggcggacttacaacattagcatttgtagctctactatataagcaccaaagcaattaaacagttaagaataataaagaacgctaaggcaagcattgcaagctgtcttagcgttctttgtcatttgtttaaattcagtttactattatcaaaatattatgctacgatacaacgatttgaaagtcgacatcaaatgataggcgaccctttttagcaattattgttttacagctttttctaacattactaatcacctcaaagaactctatcaaaaatcatgctaattgcagaatcaagatctaagttactatttgctacttgcaaaaacttgacttgatcattcttaggtatatctttcaaaatattgtttttaaataaaaattctaatgcctcaaaagaagctatttcttcacctttgactttgcctaatttataagtttgatcatagctatagttctgtagtgctgattcttggctttcctgtggcattatttgtgccaaaatatatttttctaagtcaggcgcttgagtgatttttaaatactttctgctaatcaaccactcaaattgatgaagtaagctaacgtttgcccctgattttagaccttcattataaaagtaatcgtgtttctgcataagctaatcctcgcaactaaacagtctaaatactaatggactgttgtgacttttgatattgtaagacttgttttctttgagtttatttttcaatgttgttcttaattcagtgactttctcattcttcattatctttaattggcttatctgtgttttcaccaatatggagtaaatcaacatataaatcgccatcgcctacgtgtgtatatctatcagttgcagaagtactagtttgtcccaactgttgagctacagcaacaatatttctatttcttctatataattcagttccaagtgtgtgtcgtaacttgtgaggggtagagggacgaccataggctttggtatatttacttgttaatttttcaatacttctagttgtgattctctgactttgacctttaaagagggtgagaaaaacagctggttggctatcatctgcatgatatttttcttttctctcttctaaatatgcaaccaaatatttaactgtccatggaacaacaaagactctatctttgtaattacctttacgtattacttctaattctgcagaatattctattttgccagtatttttctcttttttgatatgtacatcattcatatctaaacctgcaagctctgaaatacggactccagaacccaacattgttgctatcatagctaaatcacgagacttattgcggttaaaggcatatcgagcttgtttgcttttcagcatatcttcatagtcgttatcaataaaatcaactagagcttgctcttcatcgacaaatagttgatcagatattttctgagtacggtaattaagagtttcagaatccttttccattttaactttaagcattggattataagataaaaaaggctgattgcttgtgccaacttctgaatcaacgctcatatacttaaaaaaggatttaagagcgctgattgtttggttaatgctaccagcagtaggcaaagtaccgtaaatagtcggctgattcttgagccagtagatgtattgattcatatcctgcgtatttagcttagcaagctcacgcatggtaatatgacgattatcagtagcactggaaataggctgagcataatctgtaccagtatgagttctaagccaagtacagaaacgttcgatttcacgcaaataagctaaattcgtagttggctgtgtattaactttgtgataattgtagaaatcagttacaaattgtggaagttcttctaacttctttggaatttgttttaagcttgcttctttaacttgcataaaaacaccttatctaaaaatctatttgaattggtacattagactattgtatatcacaaaagagggttaatcaaggtgttcgcattattcctatattgcgtaattctaaagcggaatattgagattagtgggctttttgaccaaaaaagcggctttaaatgaattatccataaaaacaaaaattaaatagttttttatagaaattatttttgaccatcgaaaaataatttgattgctgattattctcaaaatgtaagttaatgattaaaactgattgcgaatttaacactaaagattgttaattcgcaattataaatttaaacagctgtagaatcatcatgtgtgcatgtttagatgctgtttaagttaaaatgctaataattagtagcacatggttgaatattagactaatcagtagcaatatagctgaatacttgatcgaattatagttagtacttaattgctgtttaaagtcattttcaatacttattggctatttaagtactccactgcaaatttgttcataaattcacaaattcgcaataaaacattaatgcgatattctatataaatatagataagcatattatttagccctaattcacggatttaatgctttgcgtatcaatattgcttaacataattaaaaatatgaaaagtccacgcaactcatatttgagcttcgtggacttaataattagctaaccattatctttttcttgttagtcttgttgattcattttcttaagaaatgcgtctttcttggctgcattactcgtttcttcttgggattttctgcctttagcttcgtcttctttaacaaaagttttaacatacttgtggttatcaattacaaccttaggtccgttgtttttattttctttatctgcgtttgctttctcctctacttcatcttcatcatcatctttttctactttaaagctaactgatgttaagaggtaaatttgattagagatagtaattagattgttattacgtgaaaaacttgcaccagataagaatgcataggctaattctctatctttgttgtttaagtatgtacagtcaacaattgttacattgccaccatcaacacttttaactgattcttttacttgatctaatttcttaaccttaatgattttgacagttaaattataattatttaaattcattttagatgcgactcttcctgtatatcgactgttgttacctctatttgtctcctcttcttcacttctattaagttgatcaataggtgattgagaactaggctgtacccttcttctaaatctaggcgtatcttctggttcaatgcgtgaatattcttttgactttggacctacattttcgtctagattagtgtttactaatttgtcaaggaagctcatagctttctcctttcgtgctaatataattaagctgataatgataaactaagttttaaagctgttgctaatgtcttaactagtgcttattataggtaaataacgctatatgagtttttacctttttaatcagaaaaatgaactgtggtgaataaatgaaagactatgttttgattcaaactaataatgaatgccaagaggataaattattaaagcaaggtatttataaaaaacataaatactttattaaacaaacggttttaggcgataaacagtggttctgtggctatattagtgttaaacctaagacagcaaaacaaacctatccttacatgagtgctacatataagggaaaaattcaaattgacgatacggttttagatgaattctatattggcttcgatacgttagaaccgtttgaagccgatatttcattagatgattttgaaaaagaaattattgattacattgatgaaattgaaaaatagaagctatggctcccgttaaaatttagttgttattggctaagtcaaaaaatgccttgtggtaattttgactcttaaaatactttttggcttaatcacaaaaaatagcttagtggcagagtttctgttactaagttattagacaaaaaagaagcatccctaacagaagaaattaatcttcaatagggatgcttcatcatttaacaaaggtttagaacagtgttaattgactagcaacattaactttttctaccttcttctcaatcttaatgtgttccgatgatttaaagctatcttcatcaaagaagcttaattgttcagccttaaatacctttgactcaatatcattagtagccagtttaacaacatgaccattagacttgggtttaggaatagagactgacttattcttcttatcattaggatgcaaaatttcttttgcaaaatcaaacaagctatcatcgtagtcattaggatcattatcgaatttaagtgagttatcagtattagagttactgtctttcttaatttcaaaatcaggatggtcttttttccactcgttatcaaaatcaattagggcagacttaattgtatcggcttctgcatccctttcaactagatcattcaaggtaatgcttttagcagatagatactcgtacttatcttcatcagggaatttgtttttggtgctatcaaatttaaggtaaagagagtatttttgttcaacattacgcaagtcaaagccatatttgcgattcaaattctgaatagcatttttaagctttaagacgtagttagaatgactgtaatccgcaaaaatgatttgtaatggatacttacctgcaccagtgatgtagagattggtagcattaacaaaaccttggaatgtgttcagtcttgctacattgtacttttcaccatatctagcagtaatatcatatccgccaaatgttgcgattgtttcatactcatcttgcacagaactagtattgctgatgcggaaaagctcgttgcgtaagcgctggttaatttgagaagtcttagagtaactatgtggagcatccacgaagcgaatgtcggttactgataaggaattcaaattcttatgagtgcttaggtcttgctttaaagcagcaattttcttttcgataataggtagttcttccttagctttttcaaggcgattaatattagcactgaaattacgcatgaattggtttttgctatttcttaacaagtttaccttgttttcaagttccatcttgagtttcaagtatgggttttgagtagcaatagacttaaactctgatgcggttaatgtctcgctgtcaatatccttcattgctctaattggagagttagaagtcatgacttgagtaatgtatttcagcttattttcttgaatctgccataaatagttgtcaaaagaacctttagttatgtagtgataaatttcaacttgtttaaagatattaccctgtcttaccaaacgaccatttctttgaataaggtctgccggtctccaagggacatctaagtgatgaacagccttcatgcgtctttgtacattcaatcccgtgccgccttttgtagtagaaccaattaggatacgaatgtctcctgcattgactaaccgttgaagctgaactttctgcttatcattcttggcatcatgcatgaatgcaatttcttttgcaggaatgtgcttttcaattagacgctctttaatatcgtcgtaaacgtcaaaatcatttttctttgtaggtgtacctaaatcagaaaatatgatctgtgtgcctttaaatttagctgttctgtagtaaatacgaaggacattgctgataagttgattgatcttgtctgaatcactgcgtttgtataaaacagaatcaaacaatctcatatcaagcgttaattttctagcttcattagtaacttttagcatgttatctttatgaggatctacatcaccgtttttgatcttatcagtacgggcaattaattcatcaagcttgtcttgttgtgcagaggttaattcactcttaactacaaaacgtttagccttaggcaagttcaactttagattggatgccatacgaatatcagtagtacgtttgtagatattcatgatttctggcaagttaacgaacttaacgaatctaagaactgtacgatatttatcaccagtagtgtttagttccatgactgacttaatcaagccaaagctattagcaaagctatcaaatgcaccaatacccattttctctaaaacatctggttggatgtagttcatcatagtccaaatttcagagatcgagttagaaacaggagtacctgtggcaaatacaatgtgagtacagtcatagtgcttttgaatgtatctaaccttcataagcatatccatagcctttttagaggtagtttggttgataccacggattctgcctttactagttttaggagcaatattcttatagttgtgtgcttcatcgacaaacaagaaatcaattcctaaatcttcaaacgtgatcatttgatcttgttgttggaattttaattgatctagtcttgttttcaaagatcttaatgaactttgaatgtcctttacagtagctcttcctgaaacatgatcttcaaaggctacaagttcttcaattctatcatttatgaagtctctcctatactcagcgcttagattaagcttaccaaattgactttgtcccataacaattccgtcatagttacttgagatgattctagcaaagaatcttttacggttttgcttttgaaaatcctcttttgtagcaactaagacgttcttggttgggtaaaacttcaagatatcttgtccgaactgtgatactaggttagaagggactacgtataaaggacggttaataatgcctaattccttaagcttaaagccggcagaaatcattgtaagtgtctttccagtacctacttcatgagctaaaagacaacgcttatcttcaatgattctttgaactgcattagcttgataatcacgcaaatgatagcttttggctaaaccattaacaaataaacggctaccgtcatatttgcgatttacccaacggttgtatttagagttgtaaatattttcgatctctttcgatagatctacatcgtccaaaataaattttttaaatttcttttgaagcttttcttctacttctctaagctccgctgttgcaacatcatccacttctttgattgcatgaccatgctcatcatagcctgttgtcatagtgatttctggctgttttgagttcagcatgttctcaagaatttggatagcgttagtatatccggcaactgactgtccgtcccgttgaacacggtatttattgctttcagcaccatatactgtgtaacccatagcttcggtactaatatgacgtattccatcggctgaatgttcaatagcattatctggaagatcttctttgttctgatccttttctgtgaagttatcaaagataaacttggttagaatatcatcaggaatccaagaagagctaaattgaaagctaatatcgctgattgctaatggttttggtagtacttctgccaatagatccttatagtgtttccagtccgcagcatgatcattttcactaataagctcctgaactgtttcgtatttagtaactacatccccagataaacacttatcctttattacataatcaacagttttatcagcgtagtatttaacgggatcaattaagatttcatcgcctaattcagaaattatctgttgagtagtatgtcccttataaatggatttcataaagtcaaagtttactcctttgtcctgtgatacagaagttaaaagagcgtctttagcacttgtggcagttaattccttgatcttaggtgatactagagccttgtaaaaagcatcccccttgacataatccatagcaccagttttggcatttagtctgtgttcctcaagggatgcaattaatggatagcgatcgtccttttcaaacaaattagcgtttgtagtggagttaagcacaccatattttgcaacaaaagaatcataaactctgttcagtatagctaaaagcttttgaaacttagcttctgaatagtattggtttaactgaatatgaattacatctaggtaggcttttttgatatctaccatccctttgatacggcttttttctgttctgctgtaatcaataaaatagaaatcagtgactttgtaatagcccttatagttaccggtagtagtcttagtattgctaatgaatctgtcatagatgttgtctttgccttcattggtagcttccttccactcattgattctgctcttagaatcggaagaaccaactatatggtggctttcatcaatgtaatagctaacactagtgatcttagcattctttctaataccgtccctatagtggtaatatacgcagtcattcaaataaccaaattcatatctacgcaagctttgaatttctttaggaagatcctgttgcttgctgtatttaactacaatcttgtccccgtaattttcttcttgagcaaactctttaggactagtcatgtggtttttattagcaagtgcagcatctaattttggaagataatcttctttattaactactgttaaggttccattatggaaattagaaaccttcactctccctaaaatttgatcgggatgcgttgaaaaatacttgtttatgaagactctatcatctattgctaatttaactacatcactaaatgcaatggtatttaacaattgataatatttattagtcttttcagtatctttcataaagaacaaaacatcagttgttaccttagtgcccgcaattttcgtaaaagcattttctgggagccttacaccgcctaagaagtcggcatatcctttgatttctttaagaatattgcgttcacgcttatccattaaaccaatactagaaataattgcgacttctccgtagttgcgtactaaatcaagtgatctctttaaaaagtaatcgtggatcaagtacggcttattgttgtcgtccggtattctaatattaccgaatgggacattggtaataactaaatcaaaattaggctcttcaaacttaacgtattggaagcctttaataaaaatatggaaatctgggaatagctgtttagcgatcatccctgtgatttcgtctaattcaacaccataaaaatcaaccttattacgcagttgcttaggcatagtcattggaaaaatacctgtacccattgctggatctagaatattaccatgagttaaaccgtcattgactaccttcttccacattgctcttgcaacttgcggattagtataataagcagtcaaagatgattctttcatgtcgttatactgcttcttagatacaacagatttaagctcttctctttgcttagcgtatttatcgtcatattcattgaagaagtcattagcaagaccgccccagcccacgtaggtagctattttagcctgttgttctggtgttgcttgttgatgattcttcttcaaatcaacgaccagcttgataatttcaacgttgttgttgatcttatctgctttgcttgctgggaagaaactctcgtctgcattatctggtaaataaaaattactcataaaaaaactccttaaaaaacaaaaaaacaccgacaattctttaacgttgattgcctttttaaaacaaaaaaggtgtttagcaagagaaccaaacacataaacaaaaagtcattaaacgtataaaaataatcagatgttgtaaaacaataacaacaatgaataaaatataattatttattcagtattaagtataggcataatccttatttataacaattttactaatttaaaaagctttacataataaatgcaatgcaaaataatattttgactaaaataaaaaagctaatccgaagattagcttttttggcagttactttacgtaaatgtaaatttataagaactaaaacgccttatagtctttaggcttttttattcttcttcaataaaagataactgcttaataatgaacccaaagttgccatagaagcagcagtaactattactggatcgctactattatttgtttgtggcaatacattttgtgcagatgagttgctgccggtagctgctgacttgactgtactattgctatcagagccagtagatgcatccctagaagaaatattttctttcttttgatcagtagccttatttctatgtgcggtaacaagctcttttggatctgataaaggcttttccgtcttgttatttgatgatacttgcttattattagcctttacattagttaatactgcattagtattgtttgatttctttgaatcagtagtcttggctgatgaagaattattaacagcattcactaaattgctaggactttgttttgaatcattaacttgagtattagtcttagtgttgttttggtctactgagttattgttggtatcactattagttttctttggatcagtagttgtacttgatgcagaagatgcagaattatcattaatagttattgaagcaccagaattttggcttgaactatttccttgattatccttattggtctggtctgtagtagttgctgaatccttagtttgagtattttgcttttggctatcagacttggcatctgtattatcatcggatttttgagaagtagcattctttaatttttgggtagcttgctcttcatttaaatctttggcgatgatattaccgtcattagtttcaattgcacaaaaagtgataggatcactttcaaatttaacgacgataggctttgaataagggcgtgttggtggtggcactaaaactgatctaattggcatcttttcaataattgcatccttattaaccgtttgactgctatctggaacataggtaaaggttaccgtttgatctgcggtattttcatctacagtttgtttagctgcagcattaggattaaccactctataccctgcaatttctggtggagttatttgagcaaaataagacgagtcataaggtgtataggtagatttaccagtaacttcatctaatgttttttcacggataatgttagtttcttgagtggcaatttgctttacttgatgcgttacaggatcaatataatttacttgccttaaaactaatttgccatcgtctcctgtcattgttttatgcgtgtaatgtaatgttacactcttatcttgattagggaacacagatggaatattattatctgaattatcagaataaacctcagtatatagatcactaggggcattttattatcagtaggttgccctgctaagccagtaatttttttcactattaataagctttttatcggtatcatcataatagttaatggtaaccgtagactgcttattatagtaaattacattttgattagacttggcatcatgacgaacagaataaactttggcattaggctcaacactaattaaagcctttgtagcgctatctgttgtttgcttatctgcagtagtcaaacctcttttatcttgatcagttactgtttcaatggtaccagtatgaacaggtcgtacgatttcaatagcggaagcttttacggttgatttttgggtattgaccatagttgttcctagaaaggctgttgccaagctaaagccaattttaccgaagcctttcttgttttctttcattttttacctcttctcttcattcattttatgtttttatatccgagctaaaaatcgagtttcttcccagacactttttatacaattgttgtcaaatatttgcctaaaggtttaagagtatttgaataaaggttgtaaaacaataacaacaatgaataaaatataattatttattcagcattaagtatattcatgatccctatttagtgcaattttgctaataaatgcaaagaacaagccactctgctggtatattatgcctaattttccaatttatagtgatgcataaaacgcaaaaaaaagcccttatgaagtactcataagggctttgaaggattatttaatccttaacctttttaatgattccagcgattctatcgcaaaactttagcaaggttttacctgataagcaagttggttcagggtagatactttgtgccaaatgcaaaaaggtcaagttccatacaccaactccaattacatagccaccattagttgcaggtggaacattaaatgcgacacacagaatgtccaaaataagtgttgtaattaagagccagccgaatgcttgcaaactaattactaaaccataagctaaaagcttgtctagctgatctaaatcgttgtttctaaaattattattaatcatgctaaaacacctcttaaaacaattaatgtagaatatttaacttgttctacaaaaaaacatttaacaaaaaattaaaataaaaattatagactaaatacctgagactgtaaaatagtttgtgtaaggatgaatgattccttaaatttatttctttaaacattagaaaaaggagttcctttctcgtatgattggtttgaacaaaaaaaacacatacagaaagaagaactccttcatgaatgattttaccaaagattttgctcaagctctattcaatccagacaaaataaatgatttattgcgcaaagaactacaacaggctgttaataacttgctagaagctgaattgactgcctttctgggctatgatccctatgccagaaatggctggaatactggcaactctagaaatggtgcttatttccgcaaagttgatacgcaatttggcccaattgaagtgcaagtgcctcgggatcgcaacggtcaatttcatcagcacacgctgcctgactacaagcagcactcggatatcttggaaagcatgattatcaagctttactccaagggcgtgaccaccagggaaatagccgatctaattgaaaagatgtatggcagccattacagtccagctcaggtatcaaatatttccaagcagatgattccaaaggttgaggcttaccacaaacgcaagctaagcgacaagtttttctgcgtctatttggatgcgacataccttcctttgcgccgagaaacgtttgagcgtgaagcagtctatattgccattggcatcaagcctaatggacataaggaagtcattgactactgcattgctcctagtgagaacattgaagtctggacagagatgcttcaaaacatgaagtccagaggcttgaagcaagttgaactctttctttctgatggtgttgttggcatgaaaacagccttagccaggacttatcctaaagctcattttcaacgctgtttggttcatgtcatgcgcaatatctgcgctaaagtacgcgtcgacgatcgtgaaaagatcatgaacgaattcaaacaggtgcatcaacagacaaacaaagaagaagccacagctgtcctgcatgacttctataccaaatggggcaaggtttacagccatgttatcagaagcttgaaagacatagaaccagatctgctggtcttttataactatcccaagcagatcagagcttcaatttattcgactaacatgattgaatcatttaacaatgtgatcaagcgcaaagctaagcctaaggcagagtttccaactgaacagtcgcttgatgcttttattggtattcaggcaatgagctacaatgaccgttatttcaatcgaattcataaaggctttggtcaggttcaggacaccttagaatcctactttgattaaataaataattaaaaaatcaatttacgagaaagaactatttacacaaaagatttgaaagtttccaaagagtcgatgatatatgcgactaataagtaagaaaacatttactacacatgggagcatgaggtataagttttacctgaacccttgaataataacttatatcccctgctcgattattagtttatctccaaatcgcagccttcaaataattactttttcaagcaaaatatgcgattgtaatggttgcagaaaatgaaaaagcatttgatcgtttaagaccaaatactttctcacttgattatatattttttataagagagacctaaagatatgtgataacatacccgttatctgttatggcattaagcatattcctaaagaatgagatatgcacaaaatctcgtggcattacataggaaaagcaaatgataaaatttaagctcttaatttttccttctatcattcgctcaattattattttacttcatttcctgccatgaaaaaataaacttacaaactaaaaaaacgaaaatttctattcaattatttcatagtgactacattaatattattgaaagaataccgttcaacaaagaaattattaacggcatccatagtgattgagaatataggtatgaccatgcaattatcattcctataagtgtttccatggctaatatgattggtgacgggcaaaagttacataggcaaaaagccaatcctgagaccaatattcctatgaaagcagttttcttatcgttatatctaaagaaatagttgaaaaagaagcctactaaaatatagagctgtagcagcggtagtattattcctttagacattaccaaaaaccagaaaagctgttgactattgttaacttgataattgtactgataggtaaacatgggcatttgtttaagtgcctgcagataatcaatactgattcttaatgctgtcactagaaagaataagcctactgttacccaaaagtgacttaaaaatggtgccttataataggaagaaaaatatcttttttcttctgcattataccgagatgttatgaagtacaagacacctatagaagccacaaagaagaatgtcatatctaatctggatggtggcaagtccttagtgacaaacttatagactgctagaacaaccatatatcctaacaaatagcataaatatctaataccgtttccctctggtgaattgggtgaatcatattcagagtatctcaagaaaaattcttctttctttacaatctagtcctttttcaatttcaaatattctacaatctttattttaaagttcatttgagggaaaaccttaattgcttttatatttccatttgaatctatattctttctttttagtttggacaactcagtttcacttattgatagagaactttcgaaattgattttgcttacttcatattttttaggaacttttatagcacctagtgaaactatttttgtttcatatccttctgcagtccaactacgattttttctatagaaactgaaaataactctttgatttctcatagggatgttttgactttcttttccgtcaataacatatactacctgtctgataaattttttacttatttctgtattgttttctttttttgcaatcatattttcaatgataaataaaaacgaaaactatagagttttactttgaaaaactaaaaatagacttgctacattttttgaggtttcgatagcagaaaaataccctaattttgccctaaatatagatggtatctttattattgcatttcaaataaagaccccaccctatttttatggctaatttgagccttgattttacgctatttgttacaatattaggtggtgtctttccctacaaaagacaccagtgtataatggctttaagaagccattttgggcaaaaaataagaatcagcattctacggtgcaaaatgattagttattaatctcaatcaatgaacttgaccttagaatgctcctctcagcgcctagaaatttaactaaaaattggagtaagaagtgataaaaatgacggctgaaaaagcaaaaaaagttgaatccaaaaaaggacaacgacataatgtaaaaccaattcgtgatacttgggttttaagagaagtccaaaatagtctaaaggatgattttgaaactggagaaagaaactacacaatttttcaaactggaaaagcaacccttttgagagtgagcgatgttttagctttgaaaaaatctgacgtttataatgccaacggaacgattaaaagaaatgcttatatcactgataagaaaactggcaaacccaacacgctttatatccgaccagttgctaatgagttgatgaactattacacgtggctggaagaatatcagcaaaagcatcctgattgcaatgtgttttttagtccatggctctttcctagttttcgagatccaagaagacatataaataggaagagatattatcggattatgaaaaaagtaggcaataaattagggttagactatttaggaacgcacacaatgagaaaaactggtgcatatatggtctatgagcaaactaatcataatattgccttagttatgaagttgttaaatcactcatcggaagaaatgactttagcttatcttggactagaccaagaatcacgtgagcatatccttgatacaattaatttctattaatcatttgaagcgttgagattcaagaagcttagcgctataatgtgaatgatctttagataggtcgataattaataatttatttcctgaattgtcaaattaagtgcaacagttaggttatgaagagatatattgcttgaagagttcctctgctgtgtgatattggaggattcggcgatatttgtggttaatggcatcagttgcctgttgaacataagcttttgacttgtctttcatgctcttgcccttagggaagaattgacgcaaaagaccattgcagttctcattggtgcccctttcccatggagaatatgggtgagcaaagtaaatctggcagcccttgatcttggtcatatccgcaaactcagagccattgtcaaacgtgattgatttaaaccaggcaggatgtctgtcaatctccttttgaagcagcctttggcatgtgcttgcccgatagtcaggaatcttgataactacttcaaagcgtgtggttctttcagtcaaagtcattaaagcaggctgattcttgcgtctgacgcctttaaccagatctccttcccagtgcagcggagcttttctgtcttcaatctctttaggacgctgttcaatggaattgccaagatgcttcttgtgcaaagcgtgaccgccatggctgtgatgacgcttgttcctgcgtcttttgagcttcataggcagatcaatattgcttatgtccagcaagccctgatcaatatagcgatagacggttggtgtgctgggacaagggtagcctggcatagtccttttgaattcaccaacgaactcatcgatgctggtggcatcaaatttagctttaaagcgtctggagagcattctcaaaaagacagcataatgcttcaatggattgcgctgatagcagtttttgcgacgcttctcataataaatctgtgcagtatcagcgtaatagtgctcatacaataaatagctgctgtctctttgcaggacgcttccgcgtttgatttcgcgactgattgtcgacttatggcagccaacttcttgagcgataacagtacgggaagttatgccggaatccagcattgcttgaatttgtccacgttgtacgctggttaattgatgatagtgcttagaaatgctagaatttgaattggtcatgaagatcttcctttcttgatttttcgtcacttcaagtttaggtcttcatggtctttttgtttaacacttagtgttgcacttcaattttaaatccgggttaataatttattttgtaaaagcattaaaatttgtatcgacaagaaagagaaatagtttgtgccaatgtcattaagttaagacattgacaaattatcgacttggacttttaagatcattcatttgcgatttatcgcatttgaatgctcttttttcatgccaaataaacccaaatcttgtttagaaattaggctacacgatataaataatatacagctgatttgggtttgagatttcttttgtcttttcgtcctggtctgatcggaattgtgtaatgactaatttgaataagaatctttttaaagatttcagttgaagaagaaattatatacatagcctggatgacaaaacatgactgtttgaaattgatcgcatattgatacttgcattttttttgtggtacatatgcttgagcatcaatttgactgactgcgttaaacataatcatgtgggcatagatctccatttcaataaatctatcctgcttggaatgaaactgtacgctacctaaagcatatttcaactttttgaatgaagtttcaatgccccagcgcaaatggtagatttctttgatcctttttaagggataatcggctctatttagattagttagaacaacttcccattcttctttgcctgatttaggatcattaattctaaatttacaggcacgaaattttattgtacataactctccaaagtcccagctgccatctttggtatttttagaccgatattttatatattgacggtaatgatggttaaccaaatgaacgttttctgtagccttatgggtttcataataataattagaggtagtcacccagcaagctatatccttatcacactcttgattaggcaactcagctacttccttaaatgcgccatatcccgttttagtacgtatgacataataacagttaggcaggcgattacaattttcaatcatgttaaagccggtataacctcgatccatagtaactatatatggtccgcaatttagctttttaagcatttgaacggcggctttacgttcatccatctttgacttaggctgaaagatgcagtcttgataagtattatttaacaggtcatagagtgcattaacatgaatttggcaatatggctttcctttatgattgagatttccaacgatattctctgatttaggattccagatttgattaaaatcagacccatcaatggcaaatatacgatatttatgatcaaataactggatattaaataaattctgattaaatacagttagaatatgcttaaaacatgcgggtgaaagctgacctttgcgttggacataagcggaagtactgactactttatcgttatttttaatagctttttggccaaaagctctaaacaactcactggtcaaatcttttccttgcatattaatagtagttttaatgactgtagctgcatctaaaaaccgcttcctagtgaaggcatgaggatcatcgataaaatcatgaatatgctttccagtatcattgataatttgatcaagacgatctaaaatatttctgtgaagggctttcataattaacaccagctttctggcaataattttgaaggtttaataatttaatcagagggcgaaaaggtaggttcttttcgcctttattttatgcaaaaaaagaaccaaatcataatgattcggttctacagagattagattcaatttgtcaatgtcttaacttaatgacattgtacgagaaaggaactcctttttctaatgtttaaagaaataaatttaaggaatcattcatccttacacaaactattttacggtctcgtaatagtgggatttattacttttatgaatactttttattatttattattacttatttaaaatgccagatttcaacctcctttcaaagagaaatggggaattatgacccaatttccttaccctattggttaaggtctcagaattaataccatgcagtctagcggcttcactgatactcttataagttacgccgttgagaataatagcatattttgattgcaattttaattgctcttgagaaatcacgatattattgctgttttcatactttttaaccctcttgcgcagtgttgttgtagacatatgcaagtcttttgcggcttcttcccaagagctatatttcttaccagaaatttgtattttaggtattacccagtctggatcaaaaccatgtgctaataaatacttcttaatagaatgcgagcgtttattttgcaggttaattcttcctattactctagtaaattcttggcttgaccaattagcttgttggcaaagattatgaacgctaaatggtattccctttttatacatacgtttagcaacagatatcaattgttcttcactatgaatattgttgcccctacgatagcttcggagatcaaattcagcagctaaatcatcaatacttttccaatagtggcgaatacaatttgatggaactgcaggactataaatttcagttgatgatggaaagcgatgctcttttttaattaattgccctactctgtaaagtatctcttccttagagatattggttgtctcactataataggttgcttttataccacacgctctaattaagtcgtgccacccgttaaattggcttcttgcgcccggataacccttatattggttcgggtgtggaggataacctagcttttgataaagtgcctgtacatcttttataaccttttcacgggttactcttctttttgtaaatgtaggtgcattatcaatatctccttttacctcaagaacaaaactccaaggaatatccattttttgcaagatacggatagatgattgagatagttcatatctgcgtggaatatgatttttctgctttttgactttatcataatcggctaagactgagttcaaaaaggaatcattaatattattttgttccattgttttgtcgtccttcatgtagttctctttctatcaaatatttgttattaatattctatataaaggaacggacaattttatttttcttttttagctcgaaaatagtctttcaatcctcgaaaataaggcaaaaaaagagcagatatactattaaaaagtatgtctgttcttttttattaattaagcataaatatagtagtggctgaaaatattacgcaaataatcaccgtctttagacagatcatataattcatctactgaataatagtctccaattctaggcaagtaacagttcataaccttgcgagtccattgatttgccttattctgtaagaccttgattttttccttagtatctaaggttaagtattcttcggcttcagatacttcttcatcagaatagcttgatggattttctttaatgtcctcaacttgactttgataattagtcattccgtcttcatagatactgctgtaaagatcatcatacattgttccataaagaatatctctaagtttaggatcagaaagaatattatcacgtttgataaaatcatttttcaatagactataagcattttgaggattatggttttcaaaataatgattattttgaatttggtcttgaagccagtctaaattaaagccttttggaaagtccttaatatcaatgtactccatatcatgtcccatataatcacgatattggaaactaaatacctgtaaatgtgctttgtctaaatcaacataaaccttgtagtatacattgcccttacgccacttcttaatccagtgagtacgaaaatattgcgtcaagattttatcgctagtaaagccttgactatcaagaatgtaatttttgaaaaatgtttttgtcttaaagaattttagaccatcgttatagcctaaaactgcataataatcagaaatcttaaagtcttttggataatcaaaatcttccaatacactttctattgcatcatttgtggtcaagcatgatacaacatttttatttgtcaaaataccgtcttgccgaatagaagttggtaacttccaaaaagcgtcaacaatatcatctggcattgtttctgcaataatattcaataaaattaaaggataattcttgtggtattttggagcaagaaacggtgcgtccgtatcttctacataataatcgctaaaactatctatactttctgaatctaaaggcaaagtgactgttttttcagtgccatcacctgttcgatttgctaaatcaacgttaatactatacataataaaaaacccccttaaaaaatacattacatgagctaaaaactattgctcaaataaacaaaataaaaaatacaaaataattttgaatcccaacatagattccatactttaacacgcttttaaaccaattaaagcctttataaacatatttatattggtacatgtttattctatttttttatttgctatgatacaaaaatacaaattatctcatgttgacgttattgtaaagatttatcaacatctaatcattgcttgtctactatatctcgcatccctgatacgggcaaaaataaaagcaatagattcaattataattcctaatagaaaacctaatataaaagctaatatgtctgctaatatatgagcttttataatacctatcaagctataaaacaactatgagcctactataatgataatgatgcggtgacaaaaatttaaagtccctaaggatcaaattcgactgcatgaatggaatcaactcaaaaatacaaattgctatccaaactagaaaaacagttaaaaataccattgaccagaatggacgctcatattcgtagaatgcttctgtagcaagccctgaaatgattatctgtaataaatttccaatagtaagcatgactattggcgaatcaaaaacaaaaacagttagtaagtagaatgctaaccaaactaattctaatccaattagtagagaaagagttctactttttccaaatttattcaaaaatctgctaagccacatacgcttcccgcttcttttcagctttacataattttgatgatgtaatattaccgcaactttttgtttgttgttactttctgatgattgatggtgcgtgcattaatagtgcctcactaattgcacctttaggaagagcttcatataaccccttcatcaataaaccatagatccagcgaatattttcttcatcttgattatgatccgcaataataactgagtgatcttgatagtcgattctaaacatgtagctttgaataattgcgtgcttaatcaaatattgataataatcatccatcctctcaataaactctacattttcgctactcttgaataactctcttgtactgattggctcattcttgcctgaatcaagctctaccttatcaccgtttaaatcaattatttccctatgatcgaagcttactgtaaagttatccatccatgtagcaaactctgaatgattaagcttaaactgactttcaatatctcctaccatatcagttaaatcattgtgtaataggcttaaagtcatattcttatcaaggattgtgtaccagccgtattgagtttcaatctctccaaagaagcctttaacgtcctctgtgttcaacagatcaatagcctttttgattgattgctcaaagaaattaatgcccagataacggctgtatgcccctctattgtatggagcagacttaataagctgaatacggtcttccttcttagtcattctttgaggatgctgacgactacgttcattaaatgcacccagcatgtcaaaaggactaacatttagaagctgtgctatagcaaataccgcataagctaaagcttctacaacgtttttatcactaaagtatgtgattgtattttgcccattagggcaaataatagctgcgtaagagtctacaatatgcttttcatataattcttccagcttgtcgcttaattcttcactacgtgtaagagcgttgttcatcttgtaactatctgacttaggaaaagtctttttcttgttgaataatgcatcaaaaaagaagccggtatcactacctgttaaatcattctttatgccccactctcttaattgatcatgaattttgttaagcattgtgccaactgaatgtggagccaagtaagtagcttctacaatcccaaaataaagcgttctaagcaggtctactctcttactaggactaataatggtctgtactctatgactttctctgtatctgatcacatagattcctccgtaaattggagcaattccagaggtgatcttcatcattgacttaatgatagcttggttatcattactcataattttctctcctcatatggcttgttcaatatatctgtataaatatggtatcttttcttttatttcacctataaaatgcttttttatccaaaaaaagaagccttataaaaagacttctttcttatctaaaaatcaatattagttatacataaattggttcataactttatctacttgcttcttgtaatgagtaaatctgcctgaaacagtatgattgctttgaattacaagaatctttttgccgtcatttgaaatacggataaaagtatagaagcctgaaccagcgccattagctacatgatagttcttcaagttgtacaagccaccattgtagtatgatggtgccttccctttaaacaggtatgcctttgacttcttggttaacatcccaccgttaaagatataattaattaccttaatcatatcttggttagacatagtgattgatcctgcacctaaagaatggtgggcaagttctaatgctttatcagtattaacagttacccagtggtcatgagtaaatctgtgcccagtcaaactcttagaaggttcggggtcgtttactgcatcccagtagaaggcagtattcttcaaatgaagcttatcaatatattcatcatcaaacagctcttcatagctcttatggtaaatctttgaaagaatgttgctcaaatatacatagttgagtgaatcatatctccatttaccatagttggtgtctataaagaccgtatgagaaagattgctttgaagatcggctttgtcgctagtgtatttataagcaccaagtttaggtggaatagaatctaaaactaatccagaacgcatttgaagcaaatcgctaattgtgattttttctgatctaggaatacttggtaaccatttagataaatgatcggtatacttcaactttccatcttgaacagctttagcaaccaatgatgcagtcattagcttttgtgttgagttgattaagaatggatcagatgaagtaatattcttttctgtggtgtagtctaagacaactttaccgttttgaactgctaaagcattgcctttaatacctgtttgacgaatctttcccttcaaaagattggttctaagaacagccttgctttttgcactttccaaagacttggtaatctctttgttttgccattgcttagagtagtagtagttttggatatcataggttggcttagtattcttttcatccatgaatggcttaacagcctgatctacagctacccagccacgccagcctaagtgaatggtatcttccatgaagtacttttgactaccgtatttagacaagtcctcaatattgtagaaaccttgactaattaattgctcttgaatcttagcaacggagttttcgtacatcttggttgataagccagtgtactttgcccactttgcgtttactggaggaattacaaataatacattagtgtgttgtttagcaaattgttgaagcattaattcaaagtctgcatattcaggagattctacataattgaaattcttttgactgcccttaagctttttaagaatttctcctttagaaagattcttcttataaaaattgttgtgaataccaaaaccgttgctggtggtatgaatttcagcttggtggttagctacacggtttaatgccttaatagagtacttcttaggcaagagcgttgttttacggttaatcttagtcaaacggtcttgcatcccgattgtagagaacatagtatcttcattctctaaagctctctttttattgctgagcatttgcttatcaaatgaagaaatcttttgacctttagctaccttttccaaacttgacttaataattccgtctttgatggtatccatatcaagcagtctttgtgcagcatatctgcttgccttattgttcttagcgtgtagtaagaaaattgtagtctgcaatggagagtaatacattgcgaatgcttggtgattttgaccttcctcggtaaaccattgaggtgaaataatcacgacagcctttttgttgcgaagctgctttgcagtcccttgcatatccatgtattgaagaaggctttgggtaccacgactacctaacaagaatggtctgtaattacgatgatacttttgggcaataatacttgggtgcaatggatcaatacgtgataattcgcttgaaccataaaaaggcacatagttctttttaaaagcttgttgcttaagcttgatgcctttaaatacgttttcgttttgagaagtggcggcttcataaagatttttgttagagaagtgtctcttcattggcaataaaagcacacagccaaacagcaggaatgcgataataaccggaccaaagatgctccataatttctttttattactcatttttttgaaatcacacctctaactattcccaaccgaaccataactgacttaagaaacctgagaagatcaagaaactaaagcagacaacgttaaaagtcaagaaaatagcaaaccatttcgtaaacttgtttgatgggacgttatgcttacgcttaaatctaagccaagcatcattaataatgattgctgtggtatggaaaataccatagacaatgtagtaccaagttaaaccgtgccagaagcccatgatcccaaacaacaagaaatatgaaacttgagataatctaatgcgattcttgaacagcttcttcttcattgcaaagaaggtaaaacgcatgtagatgtagtctctaaaccagaatgacaaagtcatatgccaacggttccagaagtctttgatgttctttgaaataaaaggcttattaaagttcattggcgtttgaatacccatgaagtatgaaacagatactgcaaacaatgaatatccagcaaagtcaaagaacagatacatgctgtaaacgtacatgactgctaaaagccaccatgacaatttaagcggaccaacttgattggctgttgctaaagcatttgcttgaacctttggtagcaggtatgttccaaagaaccagccaattaggaacttatatgccatgccttgaaacagatattgcgtgccttttctcataccctcaatgtattcttctctcttaggcactctatcgcagtccttttggaatcgtctaaaacgatcaataggaccagatgagattgttgggaagaacaataggaatctaaaataggttaatagatcaatatctttgattacaccgtctcgggtttccatgataatctgcacattcttaaatgtgatgtaggaaatacccaaaaatccgagtacaaatgacaacgtgccagctggaaatgcagtcataatcttaacggctgacaatggaattattgccaaaatgaccattaatgaaaaaatccaagttttgttctttgagcctttcttggttctgtaatgcagatacgaaaacgttaggatagtttcatagattagataaaccagcaggtttaccccttcttgccaatgactgccgtcaaaaatcaaaaataagaaagccaatgagaagatgatctcatagactttaaatcttttgccaaaatatagcccgatgatcagcggaatgagcgctacgaatacgtatataaagtattgaggattggaatagggctgtaaattaatcatgctcacttttcgttaacctctttaataacttgcttgatatctaccttgccgttttgtgaaataggcaaagaatttttatagacatatcgttgtggcaacatgtaaggcattatatccttggagagctgatcacggatcatcttagtgagttctccttctgaatacttgcgctttactccatctttaagctcaatttcagctacgatctgttttactacatgatccttgttgtacttaggagcagctacgccgtatctgacaagctcgttcttacttaagtagaagttgatttcctctaattcaatacggtatccgttgaatttaatttgaaaatcaattctaccacgataaaacagcatgtctccgtcaaagaagcctgcatcccctgtgcggtagctaggatacttctccccttccttttggaagaacgccttttcagtcttttcaggattgtttaaatatccttttgatacgcttggaccagtaataatgatttcgccttcgccctctttatcaccttttgaagtatcaatggtgatttgagtatcaggctttactctgccgattggcaagcggtcgtatttatcaagaacctcatcggtaatttcaacaccagtaacagctactgtagtttcagtaggaccataagtgttgtaaatatgactgtctgggaacttctttctaagcattacggcttcggtatgtggcaactcttcaccgcagaataagaagtgagtcaagtctggatgtccttgttcgttaaaggtcttgtccaagaagcacatttgtgcaaatgatggggttgatacccaaacattgaacttaagagttggcaaaaccttgaataattccgcaaagttttgtgttacatgatgcggcataacaacaagcttgccaccagtagtcaatgcaggataaagactcattactgataaatcgaatgaataaggagcttgagctaaaaatactggatttgttggcaatttaaaatcgctgatctcccagttcaaaaagcttaacaggttagcatggctgatttgaacgccctttggcttgcctgtagtgcctgatgtgaagatgatatagaagttttcatcatctttaacatacctgtccttagaaataggagcatcatcgtgtcctacttcatctggagtaataacagttacattaggaagatcaatatcaggtgttgagtcaataataatcaggtactttgacttagaaacatcatgaatcattgctaatctttcaacgtttgagtaattagcaactggaatataagcatgacctgatttaacacagcctaagaagcaggctaccatttcaaaagtttgtccgccccagaccataattggctcaccatctggaatattgctttggataagcttattagcccactcatcagagcgcttctttaattgaccgtaggtgttttctttgcctaagtagtcataagcaagaaggttaggatcttcttgagcgatttggtcgattttttcgattacatttttaatcattttatagatcatcatccttctagactaaaattcgttgtaaataaagtgaacagagttaagaccactgtatgagtacaagtacaacagcagcattaaaattacaaaaatagcaaccgtctttaataagaagatccctattcttttagtctttgacataatttcgcatcccttttgattagttgttttgaagcttctttacttgttcaacgatcttgtttggggtattccagttttcacgcatgaactctgaaacaggaacatcaatgccaagttgttcttgcaagtttaagagcatttgaacactagccatagaatccattaaaccgttggcaaaaatgtcttcatccattgagtctgacaagtcttcaccagttaaatcatttaaaacacttaagacagtttcttttacgtccataataaattcctccattaaaaatacttactaacatcgggcttttacgctctttacgaaaactagcttatactaaatttaaagtctgaaatttttactttttttataaaaaaaagagacccggatttaaaattgaagtgcaacactaagtgttaaacaaaaaggccatgaagacctaaacttgaagtgacgaaaaatcaagaaaggaagatcttcatgaccaattcaaattctagcatttctaagcactatcatcaattaactagcgtacaacgtggacaaattcaagcaatgctggattccggcataacttcccgtactgttatcgctcaagaagttggctgccataagtcgacaatcagtcgcgaaatcaaacgcggaagcgtcctgcaaagagacagcagctatttattgtatgagcactattacgctgatactgcacagatttattatgagaagcgtcgcaaaaactgctatcagcgcaatccattgaagcattatgctgtctttttgagaatgctctccagacgctttaaagctaaatttgatgccaccagcatcgatgagttcgttggtgaattcaaaaggactatgccaggctacccttgtcccagcacaccaaccgtctatcgctatattgatcagggcttgctggacataagcaatattgatctgcctatgaagctcaaaagacgcaggaacaagcgtcatcacagccatggcggtcacgctttgcacaagaagcatcttggcaattccattgaacagcgtcctaaagagattgaagacagaaaagctccgctgcactgggaaggagatctggttaaaggcgtcagacgcaagaatcagcctgctttaatgactttgactgaaagaaccacacgctttgaagtagttatcaagattcctgactatcgggcaagcacatgccaaaggctgcttcaaaaggagattgacagacatcctgcctggtttaaatcaatcacgtttgacaatggctctgagtttgcggatatgaccaagatcaagggctgccagatttactttgctcacccatattctccatgggaaaggggcaccaatgagaactgcaatggtcttttgcgtcaattcttccctaagggcaagagcatgaaagacaagtcaaaagcttatgttcaacaggcaactgatgccattaaccacaaatatcgccgaatcctccaatatcacacagcagaggaactcttcaagcaatatatctcttcataacctaactgttgcacttaatttgacaattcaggtaaaaaaaagagaattgaattaagtgatttgggttgtaatgttataatgaaataagctaagaacatcagaacgaatttaatactaattctgttgtttgtagcaaacataaatcctttaagcaataagggatatagtctttatgcaatgtaatcttttatgattattttttcgcaaagaattagtagttagtctattcaaaagaaaaagcacttcgctttcagcattaaagctgttgacgaggtgcttttctttttgcgtaattcatgctcttggcggcaaggtatgacgagtatttatagccctgcttcttatattgttgatagctataaggctcacgctctactccatacatggcacgctttgagcgtactactttgatcttatcaatatgattaagtccatagtctactaaagatagctgggcttgatcttcttttgcctgttccatgatctttttctgtttttctttcattttgtttaatgaaagagaaaagtttttgcggtagtgatcttcggtgtactttgcccaacgtttgtaaatttgatcagacttcctctttgccttgtcccaaatagcctgcctttgatctaagacatctttacgaacgatattataggtttcaacgctggctctgaaatatacctcatcaccataaagaagctcatcaggaagctcaaaccacggcttagtgagctttacccaaagatgatctgccacaatatgattgcctttatgatccttaaaatccgcctttttgcttaagcgaatcttcttgtcgttttcatcaactaagtaaatatccttaagtagaatgagcggtatttttttatgttgttggtttaccttatgagcaatatagccaaatgtcgcatggtaatactgcggcggctgatttaaataatctcctagtctaaaacgctgtttatcagacaaaatagaacgtccccttattcagaatcgctttcgttccatgtcccttgcgcaatcatttgtcctttttcagtcttcgtaaataccaagcctgatgatgataaaagaatttccttaatagttgtttctgcttgattgaagtatcccagctctttagccaaggtattagtcttgcggaaattgaaaataatataatccttgatttgagttgaaatataggttacttccctaataatgacagtatttccataaaccttttctgcatcagaatcatcttcttttacagagcagcgaataagaattggatctagtccgttgccaattagcttatgagtttcatcgttatctggaagcacgacaaaatcttgcgtattgaacagtatgttttgaaagtcttgtttattgagtgtaatagtgttcatttatgagttcctccgtattctttagtgcattataggtaaattacatggggaaactcatattttcttttgatctacgtttttcaattataaaacataaaatactcaaattaacatgaatgcttcaaatattaacggtacgcaatcaaatacagcctacttaatgcaacactaaaagaccgttttctaaaaataaaagccaaatttccctactcttcttatttctttaagatgtttaacgtaagggagggattcatattggatcaacaggaaaaacaaaaatggcaatctttaggacttgaggtcgcagatgagtatttcgatagtcatatgaataaaaaaactgtagaggattatctacagtatctaattaaagacgctaagaaaagcggctcatacaaattcaaaattagatacagttcttttgcggaaaatccgtttttcctaaagaaatttgcctgcgaaaaaatctggatgagcaaagaactgtttgcgactactttagaatgcttgaacggcgaatacagagaagcaagcatttcacagatcaatcaagcatggcagagtgcctgtcaaaaatactatcatgttcgtggtattggcgttatcagctgttcaaacatttattttgattacgctaaaaaactactgcagaacaatcctaatattgaaacaagaatacctaaaatcaaaaaacatcacaatctaatttgcattattaataaggaaagctaattcaatgttaaatgtaataattatatttgttgtcgcactttttggaattgtcttaactaaaaaacgattcaaagccaatatagaaaaagaccttcataaaaaggtctttaaattcaaatggttcagaaaagcctattttattttagacgagatagccactgtcggtataatctggggagctacaacttatatctgtatattatttataacacctaaattctttatggctcatactgatctaacgattaagatcatgaatatcaataccatattaatgtctttaggcggttgtgctttagtattgcttctttctcttaagtatctgaactttactattcatccccaagcaacaaaacaattatttaacttagctaaaaataaattaggtcatagaaagaatcagccaaatgaatcatctgcttctaatcaagaaaagctgactagagaattctatcgtagcaaaaataaataattggtgtagttactatgtctctactttaaatttaaaaaatgaaaaaacgcatttagcaggcttatttcaagcttactaatgcgttttttattccgtttttttagtttttgccgaactctctaatagcggctacaagctgaacttgcttatcaatatcttgtgaactatcacattgaattgacattggcgataatccatcttttccaaaagtgaaagtaatattgtcttgacttgaatatgattgcttaagaatattcatcaagtattcaggattgaagctaaaggtaaaatcatcatctgcaatttgaccttggaagttgctggttgccagcttttccttagatacatttgcggacaaataaacttcattatcctttgtaacttgaattcttgcatatgaaactttttcagagttcttcaataagacataaactctctttaatgcttcataagtatctctcatgttcacgttaaaactgaatgaggtagaacccaatactttttcaatcactttattagctaatggatagttattgttcaataatctaatgtcatattccatatgagcatccttgttaaggatcttgagcagattgtatgttgtttgtaactcaagcgactttgtcttgaagataatagttgacagcttgcttaatacatcagaaggaactacaactgatacttcatcagttaatccttcactttgtatatctgtttgtgcctttgaaaagataaacttatcagtaccgtagcaaattattccgtctttattgaaattcatttgaattcccgttaagacttcatcagcactatcagtcttagcactggcataggtagtatgcttgataagcttatatagactagcagggtctacttcaaagctgttatctacacttgtcatatcccagttaggataattgcttgcttgatctgataaggtaggcaacttgtatgcaccattatctgtagcaataattaggctttggtcgtctcttaattcaaatagcattctgtctgcattgactgtacgcaagaaattgcttaaaagggatgcattaattaaaatgttgcctgtttctgcaaccttaatatcatccgttactggtaaatcaatcacaattctggtagttggattagcaccaataaacacgattgaatcctcgtttactttgattaaagcgttagaataaatctcttgcgaatctttattatttgaattaatagtttgagcaactggcataaatctgttaacaaaaacggaagtggaaatttgaaatttcataataattctcctaaaaacataaaataaaaaacaatagaaactacaaaatagaaaaactggcaatttatttaacttcaattgctgcttaaaaacaaaaaaatatttagtcctattgataaataaaactaaatattcacacaccgaaaacaaaatatcattaaccaaaaattgaagacaatgcattgaaaacaattcaatgcaacttatgataaatcagtttatctattcgttttcatattagcgcctatttttgattcaaacaattttaccgattaattagatagtgcattgcgtacttccattaatagtttaccctgtttgtttaatccagtggctttagtgaaatcatcctgcaaactgcaatgtccgccccactgattatcatttggatttgcttcaataagatttagcttcttagtagccaataatgcttttttagaaaattcatcttggtcaaacttagccatcatacctatcttcatccattcaaatgagacggattgccaaagattatcattataatttcttactttacgtccaagttctttatattgaacgctgtctttagtttgaagcttataaatttggctcattgatttcattgatttcttatcacccatttcatacgctttgccaaaagcgaagacctgctcaacggagacaaacttccccttatgaacgcccttctcctcttttactggcgttggactcaccatttccttatttggataaatccaaatataaaacccttgtggtacaaaataaaagttggataatgggctatctggcaatttagcattatagtagcctaaataatcgccttgaattacgcctattttcttattatctacagttaaattattcattattcttagtggctattgcttccctgcttcaaaaatttgccacctctacctcctatttcttcgttttcttgaagttttttgtcaatttttagttgtattattttctacttgctacaattagagcataaagaactgaattataaatatattgttgaaaaggacttaattacaaaatgacacaaaacttatacaatgagatagttaattttccaaataaagaattgaatgattttaattttgttggcttattgattttcctaaaccaaagtcatggaaagtgcaaagatataatcaatattaataccgaagatgagaagcaaggttatttagatacattttcacgtgctacaatcgccttctctaagaaatttaacagaccattctgggtggacatggtttcttatttgaagaaagaaagcaaaaaaaatcacgagaaaaaggacatcggtgttaacgatactatatacagacgactagttaacattaaagctggcactaatgatgagttccttgctttttcagacaagcttcaagatttggctgatttgattagccaatatgaagaagttagtgatacccagtcttatacaattatggctaactatggaaatggcaaaatttgctacttatcagatggcagtttccaacaacaagctaaagggatgctttcatttgctaaaagcggtaatgttgaaatgaaaattccttacaatgttttgagatggaatttggaatattatcctagagaagttcctgctaagatatttgaaaatgattaccctattggaaatgtaagtatctttaaagacgctaaaatcactcattgctactcagaagtcgatcctaagacattcagatttgaaaaagacttggtcaatatgtctgatattttagtagcccaagacttcaaagacgtgattatgtttgtagaaactaagaatgactggtacttagcacttccaacaaaatcacaaattgaaagacacattgcaagtttatattttggtgttaatgcatttaataaaaatgtatttgatggtaaaatcagcatttcagaacttgatgataaattagctcatttaattggtatggcaaagaatgctgatcctagcaatgctatctttaatgaaaatgcactaggtcttaaggatgaccttttaaagcaacagccagcgacagaattaggatcagaaaaaattcgtattttagagcaaatgaagacagatatgtttacagatgacttagataaattgagtcatttacaagattctggtgtaataactaaatacttggtactaggaagtcatgctaggggcattcaatacggtatgagtagcactaatattaatgatttttatcatatgtttgcaaatattttattaatgcttgcttatatttatccaacttctcaacgtagtctttggctaaaatttggtacgacaatgagtaatatcaataataattcttttgatttaattcaaaagcagctaaagatttcaagcctagaataagcatttcaaacccctgctttaaagcagagggctttttttgaactcatttttactttatttaagttagatacgctaaatgcaaaatatgttgtagttttatgcttgtaaataataaatagaatttgttaaaaaagaggtaattaaggaatgaagctaaaactaagtcaacttgcattatttgcaggcggtgctgttgcagctgcggcaactggtagcatgaagggacaaactgctcatgccgctactgtaactgttcacaagggcgataccgtatataagattgctaaggaacacaagacttctttgaagaaagttatttccgataatcatttaaaggaaatcgaaactgataatggacctattgttttagttgttcgtggtcaaaaacttaacgttaacgatggcaaaaagtttaagaacgactatgtaccaaaagttaagaaggctgcagttaagaaggctgcagttaacaagactgccaatattaagagcgctgtctcacaagcacctgttgccagcactcaagctcgtccagctgctcaacaacaaactgttcaagctaatgcagtacaacaacgttcacaaactgctactcaatcagctccattaagcggtagcgaagaagctgctaagaattggattgtatctcgtgaatcaggcggcaactacaatgcccgcaatggtcaatacgtaggtaagtaccaattaagtgcttcatacttaggtggcgattactcacctgctcaccaagatgcagtagcaaatcaatacgtcaagggtcgttacggctcatggactaatgctcaagcattctgggcttcacacggttggtactaaaataaaaaataagcatacgaaaagcacgacttacaaaagtcgtgcttttttgtgtttctatttttcaatgctaggctcgaagaaatgttggtattctgaaaatttcttagcttgatttatcttacgcaatgtcattgcagtagcaagctgatcatgaagctgtttaaaagtcttataaagataagaatttcttcggctgtcttgcaaatttaatctatttagagaattacctaaattcttaaattgattaaaagcagattcatcattcaaggaattagaagaacctacaacgtatctaactacttgttcatcgcttattgaagtactactaaaatcttcttcaacgaatttaaccaatttatcgggcaaattagccttatccttctttaattgatctgcagttatatagaaattattattaacgcttaattttgagcgacaaagtgagactaaataattaaaggctcttttgctttgagtcatattcttactctcgttttcaatgtccatttcaatatcggctaattcttgcaaatgaatgatgtctttacttgtgaactttagtttcttgtcaaattcttgattaattaaattaagaattttagagacaacaggcaacataaagtcaaaatccactgaattagcgtcaaatttaattgaaaaatgaaacgttctgtacagttctttatcataaagagtgacattaatcttatggttagaaaagtctatttgtggtcgttgattccggtcatttgaatcttcaagaagtccatattgatcaatgattgtatttaagtattcaacagccatctcaatacgctgatgttgaatttgcttcaaagaaacagagttaaagtcggcacaattcagaattaacggtgataagattctgccacacatagaagcatcattaataattttcttgaatgattcattagatacccaataccaactagcatttccactttcatcaaatagttgcaagaaatcatattcgcttgaaatgcttttgatagcatccaaataatttagaagcgaattaaagcttttaatgtctttagcatgactcatgtaattacgggtttgattaactgatgagaaattagttagtaaaatatctgctatatcaagaaaactgctagtaggattagcatggttaatttgtgtttcaatctttccatcaagtccgattacagaaacagtaaaattagtaaacatataaaaacctccaaactaagggattaataaaactaattcccttttaaaaacaaaataaaaagcatccatgcgccaaaacatgaacactaaaacaacaaaaaataaaaccaaaagttttttaacataagagctaaaacaataagctcaaaaataaatatatataaaatatgtttattcaaataaatagtagcaactagcttcctatcaatccaaaattctaattaatattcagatcctaaaaatatccacaccaacaagtcgttgtaattctttgaattctggctttccttgtgccttatcgttaattccaccatacttggtatcaataattcttagcaaattaccaatttttttgtctctttgtctcttttctttaaacgttaatttaggctcgggcataggcaaatcatctacatgtcccttgaaatatttatgaatataaaattcatgaagctgttctttaacaattaattgaaccccttgaacagtagttataatccaatattcgccatcttttgatcttaaaatgagacgcttgtttttaaattgacttgaagtgtagcctaaaaatctgccaagaaaaagatccgcatctttaaaagatgaacacttcttaaaaaaattagtgggttcttgtaagcctaattttctaataacaacgggaaaaccttttctaccagtctgcatttagaagcacctcgattttgatttaagatacaactaaaaaaggtacagaattaaggctggaagagtgttcgtaatatctaagttgagatttgattaaaataacatctctatcacaaagacctgttagatatccattaggatccgacttaactatcactacacttcccataattaaggggtttaaattaacgtccagaacagtaataatacctttatatcggttctttgtataaaacaaagtgtaatttacacctccgatactgtattgactgcgcataatatccttggtcttcaagatttcaggaatatcagattgatttggcaatatttctttttcttcgagagcttggttgtcaacgttaattaacagtgatttaattttttgcattttaattcttactttccttttgtctaatttttgctgttttagtatcttatcagcttagataggctgagtataagatgtatgctatttctttagcctaataactttaaaaatcttattttgacaaaacataagaagaaaaaacaaaaaataaagtctctaattaggatttaagcgaaaagacccatttaatattggtattaataaaccaagattagatagtttttttggatggcaaaatttcataataaaagttaaattaagatttattaagtaagcaactaaaataatatctgaaagtagagaataatcttatttattactctgcttttgactagttatatttgttgttataaagacttgtgtattagtcgtattagtcatttttggcaatattaacccaaaagggatcagcactagatgctgatccctttttattgcccttattattcattaggcgaaaatactactttataaccactttgagtatagttgtgaataaaatctaaaaatccttgcattgttaacaagttagaatgagaatctggttcttcaaagtccgagacaatatagtaagcatgttcaaaaatatctttaaaactcttggattcttctttaaagtccttctttttgggtagttgaaatacatatactccgcttacttcatattctccattatcttgttttttcaatacatagaattttgtattaggagaaatagctttatccttacctacttctggataagtaagaagttcgtttatatttaatttttcgtcttgtgacatgctttactcatcgcaaatattgcgttttcctttcttaaactttctaaaatattgctttcaatttaaggttatcatgatttcttttcaatattgatttactttcttatagaaaaaaagacaaaataaaaaaagcaataatattaattactgctttttctaacttcgaagtttataaattaaagaatttaatagcacgagcaatgtatgtgcttacatttgctaatccaataatcactaaaaagataacggtagacccaaagagtgccttcactatcattctacgatgtcttggagtagttgtgatgccaaaaagacggcaaattgtgtcaatcacaatcttgcaaataaaagtaataagaacatcggctacgtgcaaaagtgcgttaataattctagttaaaaaaatttccatagtataatacctcttaaaaacacaatacaaatagcttttttaaacaatagctatttaaattaacaaaacaaaaaggtatttatttaatttttagaaatcaaaaaatacctttaaaacattaacaacatgcaactaataatttaaatttgtatagtcaaaacctttgactgaagaagtacaatcaaatattaattacattttcaatatacttaaaataagaattttgatcaattttactgattaattctatttttaaagaaatcagtaatatcttgatcaaattggttacaaatcttatttaccgtatcaatagtcttcttagatggttttttataagcaatcttttgaatagagtgatctatggtagaagctttactctttctgtttaacttctttttccttaaatcttccctcttgatatgtttaatatccttttctggatgagatttagtaggctcagactctgattccttaacagatatatcctcattagactgaacatctgacttcgatttttgtatcttagcttctgccttttctaaatctttattatctgtaagttgattctgaacttccgtatcttcactttttgattgctttattaattgatcattatcaatctgattaatttgatcaatcggaacaatctcaccagtatgggagtctacaaacatattatgattgtctggacgcaaatcatctttaacattaggtttactttcaatttgattaccagagccttgggccttgtccatatcagatgaatccttactgtgaccgttggaatttgattttgacttttctactttatcctttttatcagaatcagatggagaaatcaaaacagggtctggatcaacattcagtaagttcatatatttagtttcaataaactgttgtctcttattaaatggaattgaatcatcttcaatatgaatatttttcttatgaaaatcaaaaccagacttaccagaattaagcaaactgtgagtaatatgcccttctttaatatattcttctttttcagctcgtttatctgagcctttctttaagaaattaaaaacaattaatgctgtaacaattaacaaaataataaccacatagtgcataacaaatacctcttaaaaacaaaaaaagttttagtttaattactaaaacttaaaaattaacctaaaaaacagttcaataaagatcactttttatattgatccacattgatttctttaaacttaataaaacagttataactagttaaaatatcatcaatacccttaccatcgtttaaattccataatgccaagcgtggctttatgttgttttggataagtgtatttaataaattaagcatatcttcctttactctaggattggtaagcatatccatatcatacgcaatggttgcagaagttgcgtgcatattttttagaactggaataaatttagaatattgatcggatcccggcacgccaattacatcatgacctactttgtccaaagtatcatttttaaaatattttgggagcagatgtgctgtaattatggcttttaatccaccttctgtaagccaaactgctttaggcgtttgcttatattttttcaattcatcagatccagcttcaagaacagcaatttctggtctataagcaacttcaacaggtaatttatttgtccaatcagtaccattaatacccaactttccatgacgataaccgtcatatgatgatgaagtgatccatggatacttatttctaagcttacctataaaaattggcttataatcaatgcctaccttgcttaaatctattggttgctctttaaaagttactttaccagtatctacaacgatacttttcttcccattaggataactatattctgccgtataagtttcagttttattatcaatcttaacaataactttgccatgtgtgtctggcaacttcttgatcatttttgcatcaatcattggatgatcaacacgtacttgaaagccgataatatatccgtcctcatttacaaatggtactagcataccttgaggataagcattaaaatgtggaacactggcagttttattatctatagttcgagcaacttcaaaaaatcccggaacgcccttccacaaatccaatggaagatgattcttctttaaagcatttagccaatatgagtattcgaccttaggaacaccattaggataaaccattttaaaatctttaaagtgacgatcatccacgatgctaccaaagccacgtaaaggtgacattgctttaatatcctcatcagttaatcctcttttatgcagattagctctgtgttcttctgaaagtggaaatgcatgtaaaacaaagcggttcatcaaatcagtaactacaggttgggctaaaggaatggtattacctagcttcatggattgtgcatttttaaaatattcttttgaaagaacattattttttgatgtattaatccaccaagaacctcttggagtatctgactcgattgcttcattattagcattttttggataaatccaatgcttaaatttccaattaatttgaggattatcgttgattgcctgagcacttctttcatctactattgatgagcattgaatatacttattatctggagaaacaacgcagtaatgatctctaccacaaataggacaagctgcaccttgaaattcaagccaagcaagtttctttttgccatatttcatactcgttgctctccacttggaacaaccatacaaattacttaatttttcaacataattatttacaaattctttcaacataattaaactcctattcaaataatacaaaaaataacagaaaaatcgtgtttaacagaaaatgagcattttcttattaaacacgattaaaaaacatatttatcctatatattttttatcaataaaaaacaagatatcgtttcagtaatacaacaatactgaaaatattcaaagcacaattaagctttattgacaccaagtattctttttaaaagaaataaaacagcaaacagtcaaactcaacaatatacttaaaacaactaagcataataatgatattttatttatcaagttcaaatgtattttgtcatagtattacttaatgttcaaaaagaatgattattaaggagactgtaaaatagtttgtgtaaggatgaatgattccttaaatttatttctttaaacattagaaaaaggagttcctttctcgtatgattggtttgaacaaaaaaacacatacagaaagaagaactccttcatgaatgattttaccaaagattttgctcaagctctattcaatccagacaaaataaatgatttattgcgcaaagagctacaacaggctgttaataacttgttagaagctgaattgactgcctttctgggctatgatccctatgccagaaatggctggaatactggcaactctagaaatggtgcttatttccgcaaagttgatacgcaatttggcccaattgaagtgcaagtgccccgggatcgcaacggtcaatttcatcagcacacgctgcctgactacaagcagcactcggatatcttggaaagcatgattatcaagctttactccaagggcgtgaccaccagggaaatagccgatctaattgaaaagatgtatggcagccattacagtccagctcaggtatcaaatatttccaagcagatgattccaaaggttgaggcttaccacaaacgcaagctaagcgacaagtttttctgcgtctatttggatgcgacataccttcctttgcgccgagaaacatttgagcgtgaagcagtctatattgccattggcatcaagcctaatgggcacaaggaggtcattgactactgcattgcgcctagcgagaacattgaagtctggacagatatgcttcaaaacatgaaatcccgaggcttaaagcaagttgagctttttctttctgatggtgttgttggcatgaaaacagccttggccaggacttatcctaaagctcattttcaacgctgtttggttcatgtcatgcgcaatatctgcgctaaagtacgcgtcgacgatcgtgaaaagatcatgaacgaattcaaacaggtgcatcaacagacaaacaaagaagaagccacagctgtcctgcatgacttctataccaaatggggcaaggtttacagccatgttatcagaagcttgaaagacatagaaccagatctgctggtcttttataactatcccaagcagatcagagcttcaatttattcgactaacatgattgaatcatttaacaatgtgatcaagcgcaaagctaagcctaaggcagagtttccaactgaacagtcgcttgatgcttttattggcattcaggcaatgagctacaatgaccgttatttcaatcgaattcataaaggctttggtcaggttcaggacaccttagaatcctactttgattaaataaataattaaaaaatcaatttacgagaaagaactatttacacaaaagatttgacagtttcttattaagtattaggtctatcttatatataaatacaatgcacacttatgcatatttgctttatgataatctatgttagactggttttgcaattctcagaaaatatatagatatacgcgtggtgctagttaaatcgttttagttaataaaaaagtccaatcttgttagactcaacttgtataataatagaaaagagcctgatctgattgaactgccttaagcttaagcgttttagccaccatttacaagttagttttaaagatttagtgataatttgtcggcactggtatcgtttgtatgcaccggctgagtttactcatcggcgaaatattgatcaaattaaaactacggacagtctgattttggctttacttatctggcaagctaagacaggaattgaatcacaaagaagattctgtgaatgtttcaattgtttatcacactcacgttttaatcggcgttcacgtcagctattgcaattgatttatcagatacggcaagaaatgaataaaaaggttgacctgaatggacatttcttgatcattgacagctttccggtacctgtttgccaaccaattcgcaactatcgtgctaaaatttttcgcggttatgccaacattggttataaggccaccaagaaaatttacttctatggtttcaaagttcatgccattgttagcgatgatggttacattcttgattatgtcgtaacaaaagcatcagttcatgatgccaaggagacagttgaactgctggaaaatgcccatccatctaattactatcttcttggcgacgaaggctatttaggcaaagaactgcatcaacagctaaaacaaatgggttatgaactttggacaccatatcgtaaaaatatgacaggagctaaaaagcacaatgatcatcaattgatggctattcgcagaacaattgaaagcgacttttcgcttctgacctattacaatgccgagaacaatcgagcacgtagtctgataggctttcaaagccggtcggaaattgcaattttagcttataatttggcttattgtctagaacgatttaactagcaccacgcgtatagatatagatttgaatatagatatagatttgattaattattaggacatttacatatgatcgtacattttaagagtgaaactattaacagaaaactatgctctgccttaggtggactaacctttatgcttcgtagagggtacatttcctctaatcagcctttacaaatttgtatgactgttaaagaaaacgatggagtatttgttttttacatagatctctatcttaaacaagataaaacagaaaaattaattcataagttaataccttttgcaaactataacggaaaccttaacgacaaaattttagaaaatgaacatgattattttgaactcttattacatgagaatggtcaactttctaaaactataaagaaatttattcaatatacttggaatggattaatcgaaacatattcaattaatctagattgggataaaataatttaccaaaatgaaagaattgaatatcactataaccgaggattagcataatgacctaccacccatcaacagatgggtggtctctctacacgagagattctgcgaacagctatgacttgctctctccgtttctaaaaacgtggtacaacttggttgcacgatagcagttttttaatgcctgcacgaaagtagaggtctgccttttgagcaaggtacggtccatacctgtattttgtttttatgctagggcacgcttaagaatgtttcttgaagcgttaacgtcccgatcatgctgtgcatggcagaacggacactcccactggcgcactgccagccagtcccttgtttt

SEQ ID NO: 14 - DNA, 201073 bp, Lactobacillus crispatus
  source 1..201073: mol_type = genomic DNA
cttatcgtgattcgattgaagcaggtgtacctgagagggatgtacatattttcaatcccactaaaaaaggtacgcctacccttgatgttatgagtctgcctactaatgaaattgtagacttcttagcaggtctttttaaagacaagagtagtttacgccacgactggcttacctatcttgtagggctagaaaaagcgtatgcagaattagataaacgttcccctaattttactgatttattggagtttttccgcaatcctgcttcaattatggatatttgccattatgttgaagataacctagataagatcaacaaaagtaagtatcagaaagtaattgacgatttaaagagtcattttcatttaggtgacgctaagcagaacgacgttaactttgaaatatacgatgtgctattccattatcaagatgaatccaaattaggcagatacctgtttaatgaaaatattaatttgattaagcttaattcaattattaagcatggcggtatttgcatctttgaattagcttctagcgagttaggcattaaagacgctaaactctggtctaacctaatcagcatggcacttcagtccactttaacaaagcgcagaagtggagaagcaactcaattgccaatttatttatgcaactttgacaactatttatccgattcatggattaacttaattaaatcagcaactaattacaactctaacattacacttaatattgcatccctcgatcaaatgaaagatcctgacagtatcgaccatttacttcattactttcctgtcaggactatctacggtgacatgaagcctgtatcagaagattttgttagaaagtacgttaaatatttcattaccaacgatcagtttgatattaagtcgctaaggcgaatcattacaactttgccaattaatacagcttttactcgtttaaataatgatgaattttgtctaatccatccagtaaatcaatagcagaaacatagtcttttgcgtctaactaggagtttttaagtaattggcatcttagttcgttatactaaaaataggaattaagaacacgaggcaggtattatgacatactatcaagctcttagaagcaagtactacattacgtttgataaaaagtacaaaatattgcaagaaatcagatatagcgattaccagtttgaatctaggtttacagtcacgtctcgttatagtcaaaaacaacacattagtgagtggcttagttcaaaccctaatgatggtattgaatttgtcaatacacttttagaacagtttgattttttgcaaaacaatcaagaaatctttcccattgtagaagttacttacaagttcagaaagcatcgtgtcttatgtagtagctatgttcttaacaacaaagttgaagtcaagctctacgatcaaattgaaattgcaatcgtcaactatgaacatgctttgcaacgcagagatcatttactgctctctactggtgaaaactccctatctgttccaacatccaatattcttgcaatcttagaaaattaaaaggcatccctttgatggataatttcatttgaaagggatgcctttttggttgataattttgcagaatcggcttctgtaatttgatagaataatactgtaaagaaagttaaataagcggtggtacttttattttcggaggtggtgccaatggtgtattaactattgtgtcgaaatcttttgaaaggaggtacagtttgtttcatgacaggctttcttctgtctgtcattgctgttatcaatttgctttgtatcttagttgcaagtatgaccttgcttaccaagaaactgacaaagtggctaaaagccgtgaaaaagatgatgacagcgttccacgacttgtggaaaaagtagggcaaacaaaaaagccgtgataactttggctaggttgaatcggcttttttagtttcatttaactattgccaccgcccttttagcggctctgtacataagggaagcagtgcaatgcttctctttttttgtttacaattgtattttaactcattttgagtttcagttcaattttgcttctttgtttttaatacttgtttgcattttctttcgtatgtttcgcaactttttatgtttttgctttttaatattttcatctgtttggagcaaacagcatctgttcattttttcagcgtatatttaaattaacaactaaatattcgataagcaggtgatttttatgacagaaaaagcaaataaattctatgctgttaagcgtggacgtattgtaggtgtctatcgctcatgggaagaatgcaaaagtcaaattgaagacttccctcaccctatattcaaaagttttgaaaatgttacagacgctctcgcctacctagattgggacaaaaaagataagatgaaatttattaacagtggacgcaaaggttattataaggaccgtcctggtggtaaaggtagcatgagtttacaagaagcaatttcttctattacccaaaacgcaaaaaagccatcttgactagattgtcaaaatggcttttttctattttaagcttttaagatttaatgatttccaatttgaatttttaatatctaacatccttagatttttaataaactgatccatttcttcaatacttaaatcttctactagaacgtttccttgattgtcaattaaagtatctcgttctgattcagagatggactcactgtcgtctacatcatgtttttgccaaactgaatccaaatcaagataatcagtaacggatttaacattttggagttccttatctgtaacatcttcaatgtcactggaataagttaatactcttttccactcaatgctaagatgcaagccattcttttttaattcattgattttcatattttttctaccttctactccatttgctattatttcgctaaagccttacttttgtaagcgtatgtcattctccagttaccagcgccgtacccgattctcagtgttggaacttttttgccacgatgaatcttttgagttggcaagaagtaagtaccattacctgcccctgctaaccaaccatctgcattaaatccagtagttccatttttatggattgttttagcctgtaaccatttagcgctaattttctttgatacccgataatgttttttttcgtcagctttaattaatttagcagacattttattaaattcttttgctggtagaatcctgtaaagttttttgccacgaaaggtatgagctgtaataaccaatttcttgatcttatcattttctttgaaataccaggtaccacgagtttgcttaggtgtgatatatggtactttagtaccccaggaatttgcttgtacctttgaagctcgcatccctgttaaacctaatcccattagaatagttaacgaaataactaccattttcttgcttttttgcatgatgaatcccctcaatcttttgttgaattactaatgttaagagtaatattatcatgtcaaaatgggcttttcagattttctctatttttaaacaggaccatatttttcgtctttttaggagaaaaactcggtcttgacaaaaatatccttgactatgtttcaatttcaaataccctaccgcccatcgttagatggatggcagggtatcatcttttttctcatttaaactcatcattcaacaagagttaggtggttgtcacctgcgccacaaatagggcaatgaggattgtcttctgcttttaatagatcgaaaaaatcaatattaacggtattattgcagttgtcgcaatcgaatagcattgaatcttgcccgtgcttagttatcttcttaatatctaacatgattttcctttctttttttcaatgacatatgcttattttcgcttagaaatccttctcgacttcataatgagctaattgcttgtacttgtaaccacccgtttcatctatactcatcgtgtatattgaattacgcacttcatcttcaacatacattactttttgcctaggtattttaaaggcttgaaaaattgcaataaatccttgttgtcgttcaagataatttgtattgactgtacattgctttacatccgtaattgagtcaatttgaggaagattttcgaatactccgtcataccatgaagcctgctttgcaattaattcctgtttatatttgtttaacagcttttctaatccctcaacagttagatagtctttccatgcaattccattatctacgaatttcttaggttcttttccgctattcacaagatgttcgtaatgaaaaatcatatttttatcgtcattaccaacttcttcccacgtaataaggttatcaaataagattgatacggctatttcacgttgttgaattgcttggtactcgtaactatccatatcaatatttttcaatcgtaagtcacgcttttttaccagaacatcatatagcatttttcttagcttgttcttgcctaattcagttagatattgtttcattttgtaccccttaattagtcaattatttgtcagttcaacatgatattacatagatggtattttcgcaacgttgatgtttcttctgatttttaaccctcactcaaggtttcagcaattttttccaattgttgttcctttttcctaaaaatatgttcaacaattagtccgctccaaaaaaaaacattgcagaaaatcgttgctgtaaagtcaaaattaattccatagaggtgaatagtgaataaccagtagatcattccaaatatgccaactaaagctaaaaagaagccataataatagccaagaacgtagcctcgttgcttgctttgatcctcttcacttttaaaggtcttccaattttttgtctcaaacatagatttttcctagtttcttttttagtttcttagtcaatttatcaggattacccttcttagcatctatgagtagcaagtacaagtaataccatgaaagcaaccccttgttactgtgtagtgcatctactatttcagtgattaattgatctaatctatcgtactgaacaagacagatccagtgcaagattttctctttgcgcaagtaagctttttcagtttgaaatttaggctctggatcagttaatactgaattcaaattatcatcttctagcccattaattattttgaatttcatttttagctccatgttagaaaatattaggtcaatgatgtcatttctattcatttgaaacaacttacctaagaacgcatttgctttgatgttcaatatccactgaaaaccttttaaagcactccttaatctttgatgattatgaaactatgggacaattttctatcagcttcaactttgcagggcaaatgccaactattttctttgttaagtgagcttaaattaaggcagtccatttaacaggacgtaacactacgtccgctatcccgttgacaaagcttgtcttcgggaatacttttctgattatttgcatggcaccattaatatccgcattaataagcgtgccattatttgtcttgaacaagccccgtttaattctgcgattgacggggcttttgccttgtctttgacggctcttattgccgttattccagcatggtgtttcattatccaaagcactagtctgactagtgtaagattcattagttctaatcacgctaatgccagccagattagccttgtattgaatcatgtcaatcatgaccttatggggaatgccaatgaagttttgattgttctttttacccatgtcacttgatcttttccatgacttattattgccaatgacgatagtgtttgccccacagcttagcgcataatcaacgatgcgcttggatgctttgtgagcaaactgcctgattttgtcattcctccaagcagtaattctcttcatggcttttgtttcctgataaacgggcttaaggctttgcttggtattaattatggtttctaattgatgatattgtgcctgtagtttcttaagtctggctctttccttgttgtagtactgattgaccgatttaagattgcgaccattgattaatagtggcatactttcagtgtttgaaacacaggcaaaagcattatctactcctggatcaatgccaatatatctgccattatcaggaaggtaatcgatcttatggtcaatcttgtactgcacgattagcttgtagccattataaataggcttaaaagcaaccctttgaacctgtttgatttgcggagccaatttaacttttatctttagcttaggtattgtcagatagccgtcttttactttggcattttgattggtcacaaagaaggtatgcctttgcttttttcttaaatatttgggtatcctcggcttgcccgtaaacttgccaggattcttctggtaggctttattggccttgaaccaggcttgccagacagtattgacttcttttaaggtctgctgggctgattgaacataggctaattcatgatagagcatggactcacgagcttgatatctctttttaaacatggaatccagctcgttatagcctttgacatattgcttatggaatagaccttggcgcaagtcgtacaaagcacggttgtatagatcatgagctttgtaactaattttatccaaaatattactagcgggaatgatgtattcactgcaaagatgagtatattgggtagaatttctaggcacatttttagtctttttggtcatagtttcacctccttaaatagtttcgaacttaatcttttttatgtagagcatctcagatcagtttgcgctctgttctgcgatgcgaatactcacgcattgaaaagcagtgaagcagactgataatttcttcaaacaattcctgttcatccgtcttaggattcgcttcatcagaaacaacttcaattttagtattgtagttcttaaacaaatattcgaacagttcaaaaccaactctgcttaaacgatcttgatgagtaattaccactctttctacttttccatcaataatcagattaagcattttaaagaattgtttgcgatccttaaaagaaataccgctggcaatatcttgataagatccattgatttcatagcctttggcaagacaaaagtctttcagctcttgcatttgattggctaagtctttcttttgcttatacgttgatacccggccatagattactgtcagtcgcttagagcgaccattttttaagaaaaagaccgaatcatcgcctagaaactttagagctagatcagttggaaaaatatccagctgataaccttgcaaatcatttttcttatcaaaagtcatatcaactaaatcattagcataaaatgctgattttattgggttatctttaaaatcaataggtgaatcaaaataatcttcaccgcaaaagataattggatgtttatgataagtcagacgaatatctaaatgtactgctaattcagctaaaatatcttggttatgcttaaagtttagtgcttgcttttgcttgtctgttaatggatacaaaatagacttgtcgtctttaggattacacaataacaaacgatcgtaagttaagttatagtaatgcatttttaatcttctttcttaatcatttacctgataggtttttcttgcttatagtttacaaaatgcaagtaaagttcttatggttcactcagaaacaagcttttttcagtttcaagtttttctgtattttggctaaaaaagtatatattcttaattagctaagaataagtcatgtggtaataagtcaaatgaaaggcgatgatatttgttctttttgatcataaatttgagtatatgaaactaagccttggtaaaggttgatttttttaatgttaaacttttgtttacttttaaatttagaccaatttttgaaattaagacctcggtgtcctgtacagtttgtcatctttgagcaatttaaagataactcgtactaattttcttgcagttaatgtgcaagcacgtttatgcggcgagtagacagcttcatcatacttcttttggtaatattttttgaaaacaggatcatgtaatcttgctagattggcagcttcaatcaagtaatatcttagatatctgtttccagtcctggccattggagtatgttcgttgctgtgatctcccgattgatattgattccaggttaggccggcatacttagccagctgttcttctttatcaaagcgatcgatacttccgatctcagcgataataccagctgtataggttttgccaataccgggaattgattccagaattttgctttctggtaatgcatcaacgatacgatcaattgctttttctagatctttaatagattcattaaagctttggatcatgttgtaatgaacagaaagcactgcatcaattgaatcagtcattactttgcctaagcgatatgaacctctaacagctttcttaattgctttagccaaggtatctggatcggaaaagcgtcctctgcctttaacctgtaagtaagaaattaagtcttcggtaggcatatccgcgatctcatccagagttttactatcggttacaatagacatcattgtagcaccgaaaagaggagtattaatcttatctttatcgacagtgattagtttattaacccgataatataaagcttcaatgaagtgctgtttggtacgagtcagttcttgaactaattcatatctggtacgcgttaaacgctctaaagcaagatagttgtcttgtctggcaatgcttactcgataatgtccaaagcttagatacaaagcaatgtaataagcatcgagaggatcagttttactttcttcaaagactttatgaaacctgctggtttctttggggttaattacatcagtctctacattgagcttttgtaaatcttcgtcattttggaaaaagtaagcaggatgaaaactgtaaatagatgtagcttccatgccaataatgatttgatcatagtgtttattttgagctagatctaaaatttgttttttcagttcactagcaccataaagatcattgacaaagctatcgttaattaagcgtttgttttgatcttctgaatcaagtgcaacgacctgtaaatctttagaactaacatcaataccgacaaataatttcattggaaatggcctcctttctttcaaatttctgatcatagattttgatcttcacatgttaacccctaattacagttcttaagttcaatctcgccagtataagtattcactggttgcttctttgaaagctgcacctaatcccaattgctcaaggactagcaaaaagaagcaatcaatacagcatgtgagttagagcataaaggaactgcctgggtggcagacttataaagcagacaaaactgcaggaggtgataacctagaccagttgaccaaagccaatgacaattagaggctaacatgcgaagatcaaaaagcaaatactaatttgattaattatcacaatatgactaattacaatttatataatacgaggagttgaaactatgctaaaaaagttattgaatctatttcattctaaaaaggataagaaaaaagaaagccatgctcataattataaagcagtagatcctacacaaaaagttaacaaactagatactaaagttgattcggattttactgatgaagaagtctttatcggggatgcaggcaacgaagacgaaaataaaattattaaggatcgtacaatcccgaaagtactgttagaaaaagaccctgccatacgtaagacatggctagagactattgttgcacatgatcttaagacatttcatagtcaacctaagccagataaggagcatccacaaggagttattatcctttcacccaataaagtgttgctaaataatttattagatcaagcattgcatgtaggtattgaccgcagtcagattcatctaatcttccctgagtttgaaaatacttgtggtattgatctttgggacgcacctgtcgatcaagtagctcatcgtttacgcaagctttttcaatttaaagattgggctgaaatttcaattctgaataactactgtaccctttactgtttagttagtgatttaaaaaaacagaaaacgtcaatgaatggctttttgcattttttacgcaaagaaaaacttgttgctaatgcagtaaaagacgttaagtttaattttatcaattgtgactctctagcagaaatggatcatctaacaatcttattaaatggtgaaaagtccctccatgtagtagatgataatgtgcgccaaaacacttacgatcgcctttcacaactgattatttggtttgagactatgctacattcttatgaaaatcacaaagaagataccatgcaaaccagtttggcttataaggttattaaactgaaaattgaaagcaccaaaatcaagctcaagtcctgtcactattgagctttcttagacgtaattagtttttatatgatctgtttcagtgcaatttgtatgaatcgtggcagttggttaataaagtcattgattacttcatctatcttttcaaaactattctgtttaagctcttttaattctgaaattaagtagaccaatgcatctacgaatctaatatcaggtaaggattcgttcattagatagaataaatctccgattgtcttatcatctgtattttgtctttcctgccaggtcaatagatcataagttattgctgtaactgcgatatagccacattggccatcatagctttgaacttgagatttatctaaagcaagatattgcttagacgtcttaaaatatgtttcaatttgccatctacgaccataaagttggatgatttcttcagggctaagctttgtctgagtagtagctaaaaccaaatacttgttcttgtttccacggttggagacaaagacgagctttaataaaaagctatgtccatgatattgagcctcaactatgcttgaataaagataatgtttctttttacggatgtttgaagcagccaaacgatcatacaagtctttaacgctatagcggcgatggcgataaatgtaataaatctttgaactcttcttgatcatgccaagtccatctaaaccgatcttctttaaaatccaaaacattcttggagaagaaaaccaagaatcgaataagacgtatttagcttctactcctaatcgtaaggcttgtctaatcaactctacagttacatcattcatctttctctgagcttgatttctccttttaccagaaattgaacgttcatcagcagtaatgggagcagctccaatcatatttttcttggttttggttgacatcaaggcaaagttaaccggcaagaaggtattgccatcgctccagcctaaagttaaaccacgatatccgttcaaatactcatgcttgtcatggtcatagactttagctagcaattcggtctttttagaaaaagaccgagccatcagcgtatcgtcaacgataaaagcaagtcggcgtcttttatcgataaatggttttaagcagccaatgagccgggctgcaatcaagcataatagtttttgccagttgattcttccatcgttaagtacattgcgagcagttctaacggaaaaacgtttgtcatccttagctctgaataaagaaagccgagcaaaatgtactgacatcagccaagagataatcatggttaatgaaacggtggatttacgcttaaaattgacttgtttagttaacttagctagaccaattagattaataaatgaagaaattaaggatttagtatcattttctgtgtcgatttgttctatactgttcattgcgcaggatctcctttactttttaggtcgacacttaaagtataacgcagagagagcctgcgtttttatttttgataagaaaaagccaagaggcgcggggaaggagcgttaatcttagctttcaagtttcagttattaaagttattaactcaattcaacgagttgtggccaaaccattttttaaaaatttatttttaaatgaaaatagtatcagctttcttcaactgcttagtcctactgaaaaaacaggtattgttttaattcatctacccgattctgccctttatttaggagaaatccttgttagcacgatcttaagagatcgccacggctatgaagttaagaattctaatttaacatttccactcttgccactttatttaagtagttgggataaatatgcgtcccctgaacagcttgtttggctaagtgaaatgggacaggaaatttcactaactgcctcggcaaaagcaaaatttaagctgtctgaacatatcgccaatccattgattgatatactttgttatattgataagcaaggcttgaatggcaataaggtagaaactgattatccattgctaatcaagtctactaaagttacaccaaataacaaatgattcaaaaggctacaaatgatagccttttttgttttggaaaacttctcatggagcatttttggcaaaataggatttttcaaaaattcacttcatttttcggtatgatttttataaatgaagtaaagggtgtgacgttttttggataattatgatgataaagactttgaagaaaacgaggatgaaataatgccacaaaccaggttaggaagaaatcacagaaaacagggtttctggcattattttggtcgtttcttatcttggtgctttctagttttgggtttgctttttgtcagtggcgtaggcgtatttgcctactatgctaaaagtgcccctacggtcaccactactaagttgcaagcaggcggttcttctgctctttataccaatgacggtaaatttctgttatcacttggttctgataagcgaaactatatccgtagcgaccaaattccgcaacagttaaaagacgcagtactatctatagaagacaagcgtttttacaatgagccattaggggttgatccaattagaattgctggctcgctcgttgccaacattaaaggtcatgatatcagcgcaggaggatcaggaattacccaacagttgattaaactatcagtattttcaacagacgcttcacagcggaacattcgcaggaaagctcaagaagcttggctggctatgcaaattactcaaaaatattctaaagagaaaatcttagagtattacattaataagccttatatgggttacaacaattacggtattgggacggcatctaattattattatggcaagcatattaaccaattagatctctctcaaaccgcaatgcttgcagggatgttaaatgcaccaactagttatgatccatatctttatcccgaagcaaccaaaaatagacgtgatactgttttatatgcaatgtaccgcaataataagattgataaacaaacaatgaatcgggcaatggcagaaccaattaattacggattacgccctcgtcacactaataacgaccactctcagagaagaataattgatgatccatacattaaagaagtagttaatgaagctaaggctaaaggcttcgatccatataactctaatctaaaaattacggttaatattgaccagaaagcacaaaatgaactttacgaattggctaacagtaataaggtcccatttactaatgaaaaaatgcaagttggagcaactgtggttgatccttctaatggacacgtagttgcgattattggtggccgtcacctgccaaaagtagcattaggctataaccgcgcagtacaaactggacgctccactggatcttctattaagccaatcctagattatgcgcctgctattgaatataagaactggtcaactgctgagatcttatatgatacgccttatgtctactctggaaccaacgtacaattatatgattgggacaatacttatcaaggtgcaatgactatgcgctatgccctagaacaatcaagaaacgtccctgccgttcgtactttacagacagttggactacagaaggcttccaaatttgcaaaacaaatgggaattaatattgaaaaaagtcaaggtctctcggtaggtatcgaggccaatgcttctaccttgcagatggcaggtgcttatggtgccttagcaaatcaaggtgtttatcatgcgccccactttatctctaagattgaaacccccgatggtttagagcatctctatgataatgctggtgaaagagttatgaagacctcaactgcctatatgattaccgatatgctcaaaggtgttattagtaaaggatctggtaccaaagcacaaattcctaggctttatcaagcaggtaaaacaggtacggttaaatattccgacagcgaacttaaaaaatttcctagctatgcaggaactccaaaagattcttggtttgtcgggtatactaaggattattctattgcggtttggactggctacgataacctcagagacggcaaaatttctggtaatggtgagaactccgcccaactcttctacaaatcagcaatgcaataccttatgaaagacaaggttaattccgattggcaaaaacccgatactgtcgtagcacaaaagttggtttctggtcgggcaataactaacgaattgtacgtcaaaggtcatactcccaaacctcctaaaatacctaagaagaaaaagaatgatactcgtaggatcatcatggggagaaatcaagataatcagaatgaacaaaaaactcagtcacagcaaggcactttgcagaaacactacattgttagacgtgacgcttacggtaacttgcattactactattactacacaaggtaaccaaaaaagatctggcaattatgctagatctttttattttgcctcattttagcgtgcctagagaatttaatctgtttttgtggaattatccctataattacagaaaaagtatctaaggagaaccatatgagtattcaaagagttattttagctgatttttatcagcaaccacctaaatattatcacgcaacattcgatcacttatcccatactaaggctgtttacggcaaaaccatcccagtagctctattaaaaaatatctatctagttgattccgaggataatcgcttagcaaatatccgtgaagatacttacattgaccaagatggcaacccaattattgccgatcattgttgggttcagcttaatcaggcatggttcaacctcccccacgaattactccaaggggatgaaatctattttaaagcagatgttgaacaatacaatattactagggatgatttagctaaaaagcgtaaattgatctgggaaaaagcgaagcaactaaatgatggtatttactctgcttggcaaggatctaagcacatgtatcacggagtacagtatcaaagtgcttatgagcaaatgcgttcacacattcagtcaaacaatgaaatggcaagattgcaacaacaaaacattccaatggttgattatactttaactgacttatctgatattcaagttattaagtacttaaatcatactgaacgaagaatcaaatataactataaacaatatctcaagcaacacttaaaatacagtggttggttagttgctcgcagtacatcgtttacacaaactgggcgagtcttctgattgtcgatcagtgctggttgatctttttcgactagtttaatagcatatatgtagaaaagtggatgggttgtaatcttttagttttatgagtttgctggatgaaaacctaccttattcgatgcctaactatgctataatttaattatcatttaggattcgatagcactggcttctaagtcataatctaagataagtattaaagaatgcctatcttagatatatgtcttttctttatggtaataacctgttcaattgctcaaagctcttttctattcatcttagatgtatgtcaaaatcaccaatgctaaagagtgtagttctttttgtgtgtaatcaagttatcttaatcatgaaacatgtcatttggatcaagattgctcattgcatcaaaaccaaagcgatcatcatagcctacttgcttatctagctgatattcagctctcactgagccttttaaatgacttaaacttgagagtccttttttgcggtaacgatttagtttcatctcataagcacatggatagtacaatttggcaagccaatcatttttacggtcataatcactgattagtttaccgttgagagctttccaattacctccagtttcacgcacatgctcgtcagcaattattaccccacaatcagtaataatagtcgtgcctaagccataagaagtccttcctttactttgataaggctgaatgtagcttacccctctaatgcattcaccttgcgcaatttcttgatatttacttggaccaaaatatttgattctactaattggtagccacatgtgataatccatgaagcctttatagttgttacgagtaaaagctagatagaattcagaggatgcaggatcaatttgcaccaccttatctagtagtaaatatccctgtaaatgatcgtgcttatcttttctgattgctaaattagagactagtgcctgccaatacactggctgatatttgtttgctaatggagccaaacgatcacgattgctttcatcttcatgcttactccaattaatcgaaactggtgcggtactattacgaatttcatttagagcatcatctaattgtatttcggggtgagtagttagttgcttacgctctacaaatggcatttgccaaaaatcttccttagctatcatgttaagcatatgccacatagccgccgcttttggttcttgttcaacttgttcaagcattttatgcttattagaccatgccctattatgacgtacatgcttgagctttttgatttttgcttttttcatatttaaacctctttgttttcaaatttgtgctgacacaatcattattaaatagttttgtattctactatcattttctctgaaatagagaaaattaaagcttgctattttatgcaataagagcaaacagctaggagaaagaacttagaataccgcttgatgggtgggcgtgctaattactctcgtgcctaatgttgtaaagattttagtgagggttttatcggtttcagaagaatgcccccaaatttcaataatctctttattattagatctgtaaactttaatttattttaaaaagaggtatttcatatgaaatttaagccaagaaataaaaaggttttagttcgttcaactgccgctttgggtgctttactcatttgtggtggcgctattaccagttcacctttggttatgcacgctgatgacactacatcaacccataccgcaaccgttgctcctactggtacaactcttgataacactaagtggactgctgttgacaaggctaagacgatcactcgaacaattcactatattgatgaagacggcaaaaccgttgccccagatgtagttgaaactcacactggtgaagtatttactactaagaatggcgatcaaaccgtaaatcgtgcgtttactattgttaatggcgttgctaccaatgtagttcctaagtttgcatcagttgtatcaccatctgttcgtggttataagcttaagagtactcaatactcaactatccctgaacaaggttggtcacttgatggcactcaaaccaaggaccctaagactggtttctactcaaacctttctcaagatgaagtaatcaacgttgtttatactaaggaccctacaactgctcttaaggatgaagttcctgtcccaggttatacagttcttaatgtgaagaacatgactcgtactattaactacgttgacgaagaaggcaataagcttgctgattctgctgttgaaactgttaagtacgaaactgttgcttccgataagttaactccaaaggagcaacaagacgaaaagaaccaaaaggttgctgttgttcaagtccttagagatactaatggcaatgtcacctcagagaacacttcaattttgtctactcctgcttacaaacttaaagatgtcaagtcacctaagattgcaggcatgaagttgcaaaacaagaaatttgctactcttactggtcaatacatgtggttaagcgatcaaccatacgtacacgcaactcttgacaatggcttgccacaatacatgactcaagatgaaattgtagatgttatctatgtcaaagcagacgctaagaatactcaaaaagataagaacaccaagcaaaataagaagaacaagaacgccgttgcaggtgtagtagacaagaagaacaacggtggctctagttcagacgcaaattgcgatggcaaagattctggttcagcttcaactggttctagttcaaatgcaggctcaggtgatgtgggcggttctggctctgcagacgtaggttctggtgatatcggtggttctggctcaagtgcaaccttacctcaaactggtaacaagaaatcatcatcagttcttttaggttctggtgttgctttaatgcttagctcagtcgctatggcttgggatggcttaaagagaaagttccttcactaatctttgaaacttgcaccaatactatatcagctatactccatcggcttaaaaaaggtattaaaaaaggatgtgcataattagcatatcctttttttgcgtattattcgtcatttttaccgaaccattatccaagatattctctagtctttcttgtgactattacgtccttgtatggcagtactgatggaagataagtagctaagcaaagaattaattcagtcaagctatcacagctaaaattcagatcatcaatgttttcacgttgtttgtctggccatgacacataactagaaacagtgtaacgtttaggaaaaagttgagaataatcatgagtctcatcaattcttggctttgcaatacctttatcactgatttgccaagtaccgttagctacttgatcgtgagtttctgttgaaaaatagacacctttttgtcgataaagctctattacctgtaaggctatattaagtctattctttttagcaatttcctcaaaaaattgtgcaattccttttcttttgtctaataatgcttgctcaagtaattcagaactaacatcgtctttttccaataatagtaatgcttctctgagatttaaatcagaaattctagtttttttgttcatatgttttgtttgtttcaaaattttttctaaagtatcttctttattcatttttatttctttcgttacattcgtgaactttactacttatttaatcgttagaaaacaatttatttctagcataaaactgatagatttcaataatacgtttgacagctttgattaatttcatatcactagtctcgttcagttcaacctgtaaattcagtttatctgcctcattatcttggcagtaaatgtcaacttcaaatacattaggttctgctttaaaaataatggataagtagctgttatttgcattaattgaatattggttgattttaaattcatccgatagcgtattctttaattcatctgtcattctatcaagtattttcatagttgttttcccttttcttcgttatattcgcaagttttatcattcaacatgttaattttttgccaattcaccaagcatcttttcatattcatctctagcccatttattatacataccaatgtaatcttcacctggtgtatttaaacggacattatttttaatcaaaacatagccaatcatcaatcttttagtgctaggtaaaggaatataagtatgatctccaaggatttctaaacctttaggattggtcagcttatagtcctgtttagaaaatccatgtcctttatgatattttttcgcacgagctacaaatttaagctcttcaccatgtctcaattcacctaatttacgaaagtcggaagtgtaattaaaccacatgtgatcggcaataatattttcatcttcatcttggatgttggctaaacaaatggtaggagtcatctctccgtttgtatgtctaaaaccacaactactatattgagccgtatattgcttattgcctgcctttgcaattaaatcatgtttcaattcttttctcatcattcatcatccctttcactttccaaagctttagcaatttccgctaatgccaatggatcagtaattaaaatttttctcatagctttgtcaactggtttatcgccagggagtttctgcttaacaattgttttaatagcttgtattgataaattgggtctgtcacctagtatttggctttcatagcgcttatcagccattttagctaagttgctgataacttcccactttcctgttttaaagcgctgagggttctgttttagtccaatcagtgtccttttaggtacttttaccatttctgacatctgatcccatgtaattccgtttttaacgtgattattaacaaatctttctgctttatcagcatcagaaccacgttctgctctccaatttttttcagtcatgttgcttccttttaattgaaaattctaataacttttgtaggtttattataattcagaatgaattatttgtctatattatattatcgtctaagatacaatttgcagtaatctattatattcaaatttataattgtcgctttgcagtcacttaaaatatcattatttttcttttattatgtgttttattatcttttaagataattaaatattgactttatattaaagtgatcgtattatgtatttgtatcaagtatgaatcttgactacaaaagtttaagcattatttttataggaggaaaaacatggactttccattatttgaacaactaagcaatttgactaattcggttattaccaccaagccattaagcttaaacaaaaaaagaattgcatcccatccaagtgcatttaagcgttggttgaagaacaattccgatcaatacatttatgctaaggtctgctctccacagagcgttttagtggagaatagctataaagtcagacgcttatgccttaagatttacttatccgataaaagcacggaagaattaatgcgtattgcattaaaggagaagcgcagagtattgtttactagacctgccgatttggtaatcactgatttcaaaacaaattacgctaaagacagtaacgaaattgagcttactcatgcagatgatttctttttagattgctactacgcatcgcagtatgcagatgaattagaaaataatctgcctaacaatccttacttgaatgacgatgttcaagcacaggcaaactagaaaatatgtatatatcagcaaaaaggactaccagtcgcttggtagtccttttttgggcgtgtttttttaattttcaagaataattatagtctttttgtatctttacgtgtttttccttatgtgtaagaaaaatataccttctgctcttatcaattacttacagaaatgaccaatttagtttatttatccatgaagcatttaaaaaatctaaaaattgctcccatttagtaggtgttaaagtagcatagtattggttctgattattcagtatgctttgaacaacttttggttcattagtcagttcataatttagtgcatcccgtaaattagatatttcatcatcgttgaatgtaccttcatgctctgggtgtagtagaaacttagccaaattattacgttgtttcctaggataggtatttggcagacgaagcagaatgctgtcgtcttcatcttgacgcaaagtcgctcctagaatgcttgcaactacctgttgcaaatttctaaagctctgcttgctaaaagtgattctaatttgttctgctccgtctggactcacagctacaattactacatcttcattcataaactactccttctttgagtgaatttgctgtttttttgtatttaaaaaaattcccggatttaaaattgaagtgcaacactaagtgttaaacaaaaaggccatgaagacctaaacttgaagtgacgaaaaatcaagaaaggaagatcttcatgaccaattcaaattctagcatttctaagcactatcatcaattaaccagcgtacaacgtggacaaattcaagcaatgctggattccggcataacttcccgtactgttatcgctcaagaagtcggctgccataagtcgacaatcagtcgcgaaatcaaacgcggaagcgtcctgcaaagagacagcagctatttattgtatgagcactattacgctgatactgcacagctttattatgagaagcgtcgcaaaaactgctatcagcgcaatccattgaagcattatgctgtctttttgagaatgctctccagacgctttaaagctaaatttgatgccaccagcatcgatgagttcgttggtgaattcaaaaggactatgccaggctacccttgtcccagcacaccaaccgtctatcgctatattgatcagggcttgctggacataagcaatattgatctgcctatgaagctcaaaagacgcaggaacaagcgtcatcacagccatggcggtcacgctttgcacaagaagcatcttggcaattccattgaacagcgtcctaaggaggttgaagacagaaaagctccgctgcactgggaaggagatctggttaaaggcgtcagacgcaagaatcagcctgctttaatgactttgactgaaagaaccacacgctttgaagtagttatcaagattcctgactatcgggcaagcacatgccaaaggctgcttcaaaaggagattgacagacatcctgcctggtttaaatcaatcacgtttgacaatggctctgagtttgcggatatgaccaagatcaagggctgccagatttactttgctcacccatattctccatgggaaaggggcaccaatgagaactgcaatggtcttttgcgtcaattcttccctaagggcaagagcatgaaagacaagtcaaaagcttatgttcaacaggcaactgatgccattaaccacaaatatcgccgaatcctccaatatcacacagcagaggaactcttcaagcaatatatctcttcataacctaactgttgcacttaatttgacaattcaggattttaaaaaatttcttccaagtttttctgaattttttttttatttctgctaatctaaaactataagaaattaacagagaggtgatctaaatgtttgtctttttttggggcttagttggagctggtgcaggtgcctcattaatctatggtttatttgcattgggattaatgttgtacaatccagacctttatcacaccatcgtttcaaccatttggtttataacgataggcagttaccttttgattgaagcatttcttcacttgttggaacaccatgagaaaaaggtacaaagagaacaagaaaaaaacaagtatcataagataatttgaaacttagcaagcacgatgattgattcatcagtgcttttttcgtctaccttttagtttgaaaatcgcacctcgttatctttgcactcatttggatcctctgttggcattttgccaatatcatgtcccatcatcacatgacttagtgcaagcctaatccctatttcttctaaactacccatacaagccagtttgtaagccatataacgcaatacttcgtcatttaaaaacatttgctttaacagtttttctccgaagatcggtccaatggtatcattaggttccaatccattatcaatgccaattcgctcaaacttttgcaggaaacggttgagtgaaattgtagcaacataattgcggaactcaccatcaaatatttctgcggcaatgcttggacgcaaaaaggaacgagttttcactaatctaaagtacaaaagattgccatcaaaagtaaacttgcctactctcctagaataccaaccatctcccagtgctaaccactggtattcaaagtcctctccaggaacaatttgagctttgatagcaatttgtctagcgattttctttcgtttctgtcttcgaatagcatcgtgaagcggtgcaagagccattaagaacttgtctttaagcgtgaagtgatcgacttttatttttatttctttgatttgtttttgtttgttcatttctaatatttacctaaattaccatgagtagacttttatacttagaacttttgtgagcataatcataaaccatgccgtaaaggtctgttactcgattatgaaacttctgatatgcatcttgtgttactttttgcgtatctttattaaaacttttaaggacattttgatattgagcaaacttgcgttgatacattttttgtgaatgagaatcctttggcatcttagcatatgcagaataatagcaatgcaataacaataattccaattccattgctgataaagaatccaaatatcgatacaactcgtcaacagtattactgccacttaaagtgttcatataaccactactttctctttcaaattattgtcaatttcatttttcatggttagattgtattgctttttacctttaattttagttttactccaatctagtatttttctaatttccctcgctttagaaaaaagccaccaaatctcctctagttccttacaattaaaggcatcaaaaagactaaagaggtgaaagtatgacaaataaagaaatgataattgacagttatcacagtagcaaaatgacaatgattgtcacttttctaggaattgtagcaatcgcattatttgatctaatttagtgagggtaaagatgaatcaaaacaatagaataaaggctttgctaaagaaagtaggcttgtcattggtagcaaccgttgctgtaactacagcacttactggttgctctaacaaattaactaagccaaaccaatctcaagcctatcagcaggaatctagcaaagttccgaaagcttctcctgctccacaaaaaggcattggtgggattaccaaggctcaatatcaagagttggccaactcccaatttaagaacggtacgtatggctatattgccgttaacaataacaaatccaccctaaatccaaagagttggaagaccaataaagtgatttatcaaaacttagataaactcaaccgtacatcttcatcaaatactggttttttagaaaagcgtaacttggctaacggttccttgagagtaaggcagtacatcaatccaactggttggcattacaatcacggtggtaatcaaatttataatcgcgggcatctgattgcttattctgtttccgcaggtatcgacaaaaacggtcaatacaatccgcaaaatgaatcaggcgatcaaaataatccccaaaatttgtttactcaaacagcgtattcgaatcaacagcttcaaacaatttacgaaactaaaatacgtaatgctttgaaagccaataaaaaagtaatttatcaagcaacacctgtttttaaaggttccgataaaatggcagtcggtattaacctacaggctgtttctactgataaatcactaaactttaatgtctttatttacaacgtacaacctggatacagatttaatcttgcaaatggtcgggctaaacgtgatttagatatgagagttaaacagcttccgccagctttgcaatctcactatagcaatgatcggcaaaatcaaagcaaaagtaattttaatcgttttagtctcaaacataatctctaccgtcaatacaatgacaagaacaatcacgtagatagccgtgctagacgtgacgctaaagcctttgagtatcaagaattggaagaagccaaaaaattcggtaaaaagcagtggcaaacaggtaaatcatatttgaataaggctcaaaaatggctcaaatccgattatgatcgtcaaaaacaagaaaataatcgtagaaatgaatacggtcgctacaaataacggaattttagacatacaaaaagcattcacacttctgcattgcagtgtgaatgctttttattgttctgtattaattaggcgattgcttttaataattgtatgtatatctttaatagacggtattttggcattgattggggtaaagctatcattcaattcacaaaagtaatcaaagcgaggtctgaattcaaaataaattggagttggaattcctccgaaacgatttttgagcatgcttaaacgaatgacctgactaggttgcatttgagttaaattaattccttcttgaactatttgacccctatctttagattttttagcatcttttagttgtgcttcaaaccattctccaacagttttattgaaaaaactgttgtattcagaaggcgcattcgtaatcttggtatgatcgaaatcatagctcatggtcataatagcttctgctgagtaatcaatatctcctgactccttaaacgcagtcatacctgcatgcaaatcagtatatgaagctcgattgtaagaactaattacaaatactggaatttggaagtctcgtgatattattttcaaatcccagatggcatctgaaactcgttgcttagccgttgattgtgaaagatcatcgctactttgtaaaagctgtaaatagtcaataaatattacaggcttttctccagtacgggaaataaaatttctgatatcttctttgacttgactaacagtaggtttcttggtcatattatctttcaaatgaagatatggcgaaagatcattgtacatttttaacccatttataagggctgtcatgatctgttgtccagatttatttccccaagttaaattccaatgtcctttataaacattgaaaaaattaggcaactgttcaagtggattcgcttctaagacttcattgtaaacttcaccatagccactcaattgaaaagcaaaacgattaactgtcttagcaatcatttgtttagcggacatctcaagtgcgtaataaaaaacatgatgtttagtttgtgccaaataagttgccatttgtaaagccaatgtagttttacctagacctggcgttgcacctagcacataaagctcattattgattccaccacctaaaatagaatccaatttattccatcctgttcgtaaagatggtgcatagccttgaagaatccaatcaaaaaattgttgagcttgattatctggatttagataagtattaataattgctgatttaaaagcattaggatttagttttttactttcttcaagtgtcttttgttccccactgcttgccaagctaactgtataagcgttatatccgttggttcttaaagtactttcaattacatcagagaatctttcagcatcatctctatctaatgcaatcaaaaaagttggattatagtccacagcttttctacgctgctctatatcaaagctttcgagccgttgcttaactgcttccgtgatctcatcaaggttcttaggaacactattattactagtttttttatcttgtacagcttgaatgtcatttaagagcttttgagttacatttgtattttcaacgtctaaattcaaactatgaacagaaatcgcatcgaagatagccttccttttgcctctattatcatgtacatcagatattgcttctgcatcttttgcggtactaactacatagatagctccgtgcggattactcaatcctttattttcaaccattcttttttctcgctccaacttttttaccaagaaggtgattcatcatcagaatttttgatggcatcattatttagctcttgagcatttttttgagtctcaagttcctgctttaatctatctttctgatcttgtaacttttctattgtttctaacaatttttgagcgtaactgcttttcttaaaaagttcactacccacatcaaacttcgataaatccatatttctaatattgatattttcaaagttaggcataggcttttcttgttcaggaagatctaagtcacgactcatatcagaaatttcagtttctaacttaatcagcgattttcttaaattgtcaacccattcttgattagattttatttgttgctcgattaaattatctgaattcggtgcaacctccaagctgtcgtattgagtcttgaacgtaaaataatagcctagaattttttgccttcctctattgcctgtcctacttttaccaatttctttgggattagttataggacatgctttaatatcctcaaataaatgtttttcctccaataaatctattgcttttttaaagactcttgattcgatatacgtaggctttttttgataactctttgggacctgaaatctagcaatcacgtctttcatcgaaagttttttggtgcgtccaatttgtcggtattgacgcaatagtagataaagttgagtagcaacataattttccgttaatgaagctaaatcatatgttagcgttttattataatttctttctaagttcgttaataacggaattactttagtatttaattctattcttaatcttctagttttttgattgtaatcgacttcactaaagaaataaatcttggtccaaacttgaccagtagttagatcaatcgttgtttgcatatcatcaaataaagtttttaaagctttacttaaagacatatgctttgtagatttaaaattaacggctttcataacttcttcaccgtctaagtctaacgtagcttgtttttcttgattggcatcagaaattatgatattaagaagtacttgactgtattgatgtccactttttgcaaaatttggataaacgacatctgtaagttcatttctaaatttagccactgcatatttgttataaggtcgcaaattttcagatactattttagtactatttcgctgtccagacttctcgttcataattaaccctctttttcaccaaaatggtaaaattttccaacctcaaaatactttaaaaaagtattttgaaaggttttaagttaactctacccgtttttgcatgtaaaatcaaggtttccctctatttttattactttatttgtacattgcctattattatactcgtattttgttgtcttttttattatttttctctcattctgttactttaatagttattttcctcctattttgcaattttcaaagttctacttttttgttttacactatattagtcaaaaattatatagtatatttattaaaatattttcctcctgttttgttacctttttgtcaagattttggcaagctgacctcacaaattgttactttaatgcccgattttcctcagtctgagttactttaatgcccgattttcctcctattttgttactttaatgttctgtaacccttgtggctgtaggaatacggagatcctaaaggtcctttaaaggacctttaaaggaagaatgggggatgtaaatttaagaattaccatcccccatttctaagtatgcttcttagtacttctatttttaagcatcaaaaaactggaacattagcgttccagttcgttaaagtttaagcattgagtaaagacatgaagaattactcagtcaactgaaaagttgactcttttattttatcgtatttcacataaaaagactaattgcaaaaataatcgttttaccacatgcatagtgattgccattctactcgacaaattagataattaggtaatagagcattttccctatttttgaaaaaatgacttaatcttctttaaatttgctaaattactaactgttaaaaataaatatagacaaagaagggtattagatgtcgagaaagcaagctaagcataataacgagtacaagaatcctaaagggaaagtttcaacaggtagtttagttaggaccattgctaaacgtacaggggttactcaagtagataccgataaagttataaaagcattaattgcgcaaattcagatggaagttttcgataataacaatcaagtatcactagttaatttgggtaaattttggagaaaagaagtcaagcctaacaacaatgaaatcattaagcgagttaattcaagtaagaaaatgaaacccaagtatgctctcacatttcgaactagtgcaaatattcgtcatgagcttgcgaatagagtaaaaaaagattccgattcaattatttaattatctttaaataatttgagatcaacaagttagttgatctcatttttttgtttttgcaaaaaaagtgtctgggaaaaaactaagtctcagatcatgaaaaaagaacgttgaatttttgtttcaacgctctttttgtatacttttagctccagccttgatattattaaatcatcacaaaataaaaaaggtggaaactaacatgtacaagaattatatcacaggtcaaactgctttaacacttaatctagattttgccattccggccaatcatttggctaatgtcatcagctggtttgtagattcaattccagaagatgttttagtaggcaagactgctaaaacgggccgcccagcctatcatccagccatgatgctcaaaatactgctttttgcttactccagaagagttttttctggcagaaagattgagttgatgctggaagaaaatctgccaatgatgatcttggctgaccagcaaaagatttcatatcatactatcaataattttagatcaagcagccatgccaatgaactgattaaaaagagctttatctacttcactaacctgttagaagatgaaggcttaatcaatgaaggtgctgcttttatcgatggtactaagattgaagctgatgctaaccgctatacatttgtctggcgcaaagcggttgaaaagtatcatgaaaagctgaaaggccaggcagttgaactttatgatgaattgattactaaagaagtagtcaaagaaatggaaaaagaaaaagttcaaactagtcaggggctaaaggaattagctcaagaaactgaagcagaaattaacaagctgactaaagagattgagcaggaaaacaaagccattcctggcggttcacctcgaaaagccaagcgacgtggactaaaaaagattctgcaccggctaagaaaagattatgtgccaagaatgcaaaaatatgaagaagccgaagagatctttgccggacgcaacagttattccaaaacagatcatgacgccacctttatgcatatgaaggaagaccacatgaaaaatggtcaattaaagcctggctacaatattcaagcagtcacgaccgatcaatatgtagttgattatgccatctttcctaatccgacagatttcaaaactttggagccggttttggatcaaatgaccgtgttggacaagtttgacaaaatcgtcgccgatgctggctatggcagtgaatacaattattcgatgctggaggaaaaatatccagacaagaagtactttattccctacactatgtatgaaaaagaacagaccaaaaagtataagaatgatccaactaagctaatcaactggtactacaatgaaaaagatgattattacattgatcatcatggcgtcagattcaatttcaaatattacagccagcgcaaggatcgttctactggtcaggtccgtgattttaaggtttatgaggcagacgagttccagctaacgccagaattggaacaattggctaaaacagctagcggccgccagcgccaagttcgctataatcctaactggcaatatttaaaagaaaaagcaaaagaagttctccaaagcgaagaaggcagacacatctatggcatgagaaaatatgatgtagagccagttttcggacatttgaagaacgtatttggcatgcgcagaacgcacctgcgaggtaaagagaaggtcgaaaccgatatcggaattgcctttatgatgatgaatttgaacaaatattgtcaaagaaggtggctgaagggccgatttttattgttaaaaattttaaagagaacaaaaaaacgatcaagattcttaaaaaaggaaatcttgatcgtttttattcatctggaagctagttttttcccagacacttggtttaattttcatactctccgttttctaccctagcccataattcattaatttgttttctaagtccatatccgtagaacattaataagctagcaacgaaaaaaccaaaaaacagattgataatcgttaaaaataataaagtatcagagtatggccaagaataataatctaaacagtgattgcgataaagcacagcacaaccgaaaatgcaactagttaacccttgtactgctaggattgaaaatatgccaaatactgcaataccgattgtaatggctaataggccatagccaatgtccaaccatccagagattttcattattttgactaaccgaatattgttctgatccattaaatcgtaggcttcgtctttattcactttgaccacctgcttgataaaaatgtttccactgtttgtcgatattgtatttgccttgttctgtagtattaccagtccaccagaagacttttactactcctaaaactttattacgtggtacaaaaccgaaatagcgtgagtcatttgaaacacttcgatggtctcccatgacaaaatattgcccttttggaacggttaaagtatcattgttagttttccaatcattttttttagccagctttttgagatcccaattaccgccgctcttattctgttcttttttagagatatagctttgattgattggtcgatcattaacgtagattgtgccttgactactagtaactttatcaccaggcattccgattacacgttttacgtataatttttctgatgctaattcaggatctaccccataagcattaaaaacaattacagatccatgatgaatgggcgctgttttaaaagcccagaccttttcaccattttttaagttaggttccattgatggtccatctactgtagttggcttagccactagttgcgtaaaaccgatagcaatgataataactagtaaaggcatccagacccaactccagatttttttaattgtcccccatggactaccgtatgacatacttaaagcccccttgtttttattttgttcagttgtctttactagcttatctaattggtcttaattatgggacatttcttgattttgctaaaaatgcgttatgaatcgaagaaaaatttttatgttgagctttttacttctaatttagtttttcttacgtatctttcgtcactttttagtgtttgcttaattttggattgtagattttggcctttctgaacataaacgatttctttgctaaaaatcggctatgattattagcaagaaaggacacacggacgtatgaatgaattaaatcgagaaccaagtattaaaatttataatccacaagatcctaaagcggatcctgacccttatgtacaaataattgatgaagacgatgagccatattcaatcgaggactgggtaaagatcgttgctaaagatagtcacggcaaagacattagtgatcgagtcgtgtatgatgcaagtgcagtagacttcactaagtcgggtgattatcctgttgaagtttcagttatggatgataattacaatatggcttctgctgtttttgttattcatatgctgtcacccaaagaggttaaacaagtcgaaagtggtaagccgctaagacgagaatcagaaatagagcgtgaaaaaaaggctttaaagcgtgaaaagtttattgatcgtgcctttggcgttggcttaatcattatcatgatagttttttgtgtttacacttaccttgacgcattttagagaggattgacagtattcatggatatttggttatcactgacattaacgtatttatttttcatcctcttctgcttcttaatctcatggcagtttagctatttaatgcatccccctctggagttgcaaaaatacgcaggacaaagcaagtgggataagtttaagcatttgtattacaaagatactttgaaattgcttggaattggattgccagtagttacgatcctaattgtttggatgaacataattacaatcaactttagctggcggattgctctaacgacattaggttcgattatgcttggcacagtagtcattatcaatcaaaaaacaaaaaacaaataaaagcaccctgtttgtgaatgcagagtgctttttgcttgcctatgctttttgaaagcgatgtttgagcttactgaaaatatttgttttggtctgatgtagctgatgcagttcttttttcagcaagctgttttccatttttagttttttatctttgatataaagttctttgtactcttggtaaagcttgctggaaatagtaactgtctttgctttttcaggttttaattggggtttgattcctttaaccgcatcaactgtttctttagggatgtcaccctttcgagctttgtaagaagcttttacatcatagtaaaggcttgccagctcttcgtctgtcagtttaactactgctatgccattttttccgttaatggtgactaaagtcttttttaaatctggttgatattgtagagcaattggactgattcgttttttggtcataaaaattcctccttgcaagtatcttagaggattttgctgataagttttgatttagtctggattgtcacaaatgctatctagttaagcttttatgccattttgtagaaaaattcagtgaccattttggctaattttgagcaagtcacaaatattttttcaacttggtaaatttataactgtaaaaaatcattagcatattttacggaggtttatttcatggcaaacttttttggaaatatttttggtgaaaaagataagcataaacgtaaggaagattcaccagtagaaagcaagaaagagaatggtaaggacactaaagttcttgcaggtcttggtggttctaccaaaatggcagaattgttaaaggaagatagcaaaggcactaataatgacgttaagccagccgttgcatccccagagcaatccaaagctgattcggataaaagcaatgctgataataccgaaactgctaagaaagccagcaccgataatcatgacacaacggttaagaaagatgataagcatggtaagacggtttcagttcaagatgaacctgacttaaagcctaaaccagctaacaagcgtccagaaaatccgaccaaaccaatcgtggtttcatttacttacaagggcaaaaagattagaaatgactttatttttaccgataagatgggaactcacttgaagctatctgacttgcccgaagttaaaggatataagcttaatttaaaaaatgaacttaactatcaaattggcagaactattcagcatgttaccttgcattacttaaaagacgaggttaagtacgatttgattcctgtaaccgaggatttaaagccaattaatcctaaagcaattcgtcactatgaaggcagaccaggaacagaaatttctgcaactaagtttccagttattaagggttatcgtgtttacactagtcgtaaatatgaggtccctgatgatggcaaagatgtgaaagtagtttatacgccaactactcagacgattcatctaatttatcaaacgattaagggtgaagttcttgggactagtactaagagcggcaagacaggagaagcttacagcattgatcctaagaagcggtcttttgcaggctatcaattatctaagttacccaagaacttaaaaggcaccttccctgccgaaagcatggatattacgattgaatatgaaccaatttccagcaagattgaagttagcttccttgatgaaagtggcaagccaatccatgcaccaatggagtttgaaaagaaatacaaggacgcatatcacattaaattgcctgtcactgatggttacgaattagtaagcaacccatctttgcttaacggcttttacgacagagtaaccaagcacattgtcttacgttacaagcgagcaacagcaaagtttaatattaatttctggtttgataaggattttaagcatagtgcaggcgatcctcgtccagtttcaggtcgagttggtgatccatttgctgtacaagttcctgaacatgaaggctacacgccagacaagactgttgttaaaggaaaattcagtccatatgataatccagatgtagacgtggtttactctaagattcctgccgaagttcatattactttggtcgatgaagctgatcgtcctttgccaaatcaaccacaaattgttaaaaaaggcttttggggcgattactttgaaactgaattaccagagattccaggctttaagcgtccgatgaaggttttgaagaagaaattttatcgggcacatcaagccgaagaagtacattacgtagctcaagaagttagtctcgttgttaattacattgataacaagaccaaaaagccaattgatggctaccctgctttccaaaaaccaggtctttcggggaccagttactcaatcgaaggtgaaatgatcgatggttaccgtctgattggtttgccagacaacgcttctggtgtttacacagctaagccaatcactgttaacttaatgtatgatccaaatccatcagaaattgttattcaccgtgtagattcaaccttaaatccaatccgcaagacggaaatccgttcaggctattatggtcaaacttatgatattaagactgatgatattccaggtttcaaatttatctctgcttctgatgatcttaagggtaagttccctgcttccagacttgatctttacctcaattttgaagcggcagatgtaacctttacttttgtaccagttgaccaatttggtaagcctttcggggatgaatataatatcgttatttctggtaaagctggacaagagtttagtcatgatatgcccgatattccaggctacttaagtacagctactgaaatttcaggcaaaatcaaagctgaataccaaaacgaaaaaattatggttccatacaagccaaaggacgaaactattactgttcatactatttacgcaggtggcaataaagacggcatgcatccattccatgactttactcaacctggacctgttggcagtacattcaagtacgagtcccctactcttccaggctttgaagcaaatcctaagaacatctcagctaagtttgctccagagcctcaagaagtgacaattgtctacacggtaaaacaagaagaatacttgattcaatttgttgatcttaaaggtcagcttgttggtggaatgccaaaggctaaaggctattacaaggaagctatcagtattggtcaagcaattcctcgtggtttccatctaccagatggcgttgattctcatgtttatcttgatggcagtggcgactatcgtgtacaagttatcccggaccgtttaactattgaattgattgctcaaactgttgacggtaccgatttaggctcacgcagacaaattgatggtgattaccacgaagttaagacagttaatgcattgccagttccaggctacacccctgttaaaggcgataaagtatcaattaaatttgaactcggtcaaactacttatccaattatctatgaaccagaagaccgtactttgacaattagctacattaacgccactactggtaaatcaattgccgagaagaagattgttcatggcaagtttaacggtgagtatgacgaacgtgctaagcagattccaggcttcgttgcaatcaaccgcactcatgaagcaggtacttttggaatgcaagatattgaaatggcattcttataccgtgcatcttctgatgatttaaaccgtgcaattactccaattgaggaaatcatcaaagaaaatcaacaagccaacaatcggaatgcccaagcggttgttcaagcaactcgtgtgccagaagtagaaactccaccatacgatagtaacgacactgttccatctgctcaacttaagaacactcatgttgaacatgtagcaaatactctaccacgacaaccacaacccaaatactccaacgcagtctcagactattattcaaatagccaagatgatcctgctatcgatcaaggagcttcaaatttgatgaataagctttacggcaaacaatattatgataatggtcaagatcaataaaggagggatccccatgaaaagagctattagattaagtggggatgtctactctattgcaagttttagtaaggaatttggttatccctataccaaagtcctaagcttgtacgatcaaggttatcgggatcaagagttggtagataagttaaagtcagagcaattggtcattgacggcaagacttttaaatcattgttgcaggcatcccaatattatgggattccacccactaccttttatcgctatgcaaaaaaaggtaaattgaaaaaacttattaaacgcaagaaattgcttgataagtacgaccttaattagaaatgaaaagcatggtctttatttgaccatgcttttttgtcctttttagagaaaacgagatttggctaaaaaagttaggcataatagagcatggatagaggaacaaataacttctcctctgtccatgtcatttgttagttatctagttcatttgtaattttttgtaatttcttcgttatgtttaaatttttagctagattacttaacagactgcatgtgcagtcaaagaattgattcctattactacagtttagtttctgggaatcatggaacttaaatggtctgcatttcttgctcgcatcctttctgttttgtatgttttggggatgcaggccatccatttatttctatttcatatccttactaacaaagcaagtctgttgttttctccttaacgatggatttgctttttcacttatgatcttcttgctggattaatttgaaagccgtagaaacgcaatctcagcattcatttttagctttttgaaaaagcatgtaattgcttttagtttttgttagtttagagctgtgccactgaatttagcctttcaaaaataaaattattttattagcaaaacagaataatttcatttttagggcggtgggcacaattaattttttaagaaaaagactgaaacgtaaattatggggactagccttatcggtaggcggtttctttattatcatcattatcattattgttttcttcgcaggtggggctatttccgaagaaagcaatggtggtgattgtagtaatgattccacctcttctagtgtttcgattaaaggtagcaacggggcttggacgcagaaaggaaccaaagcctataacactgccaaagctatttttaattttttggtgcataaagaaggattctcgggtgcaggtgccgcaggtgtagtagctgttgtcaatcgtgaaagtggttttaatccatcaatttctaaccctgcaggtggtgtagttggtttatttcaatggggaggctggaatggcgatactagaaatagtgatcgtattcactctggcggcattatccattcatctaaggatcttaccgtaagtaaagaattgaaattgcttgattatgaattgcatcacggttatgaaagagcaagaagtacagttggacgagctacggatcctaaaaaggcggccgaacaatggtctctgctttatgaaggcgtgtccttgagtgatggtcaaacaaaaatagatcaaattcatggggatgcagaaagagcctaccgtttatttggtggatcgaagttcaaggctaaaggtagtctacttggtagcggctctaagactgctaaaggttcatcatcggaagactctggtgatgatgaatgtgatgatgatgcaattggaaatggtggtccaattttaagtcaagctaagcatcttattggttattttacctacggtgcgcacggggtttctggctatggtggctggaagcatcctaacaaaaatggtcaaacggactgttcaggtttcgtttggctctgtatgacgcgtgcaggctatgatgttggtaatgacgcgttctctactcctgatatggaacgagatgctagaggtccgcacaaataccttaaacagattagccctaaaaatgctaagccaggagatgtaattatcatgaatgttggtgcaggttatggagcaagcggacatacagcagttattgcaggtaaatatcacggctatcaaactaagatcatcgaaatgggtggagataataatggtcatgttcatacttctaatattcacgattctttcttaagtttgattcctaatgctcggatcacttgggctagacctgtcaaaagaaagtaaggtgttgtaatgtgaaaagacagcaaaagcaaaaagagcctaaatctcctcttttgtattttggcattgcgattgggtgcgtagttatttttgggattattgctctaggtattaattcctaccgcaattcacaagctcaaaaagcgaagcaggaagaacaggttcgacaagagaaaatccgtaaagaaaaggctcgtcctaaatttaaagcttatcaagcacaagataattctggtagcgataagtcagaacagcttactaaaaaacaagccactaaacggttaagtgcggatattaattacggttttaaattaatgcaacaaacagacgcattagttgggactaaaattacgcaaaagcagttgtccactgcacaaagaaaaaatgttgctaaatattttgattcattgactgtatttaatagctttaatcaagcaacaaatatctctactgcttcgggacaaaatttttacgggcaaaatggtcataacaagacctataaaacatccaagcaaggtgacccctaccgtgttactggcggatcagttgaatacaatggcagttcttataatgactatatatttgatgtcctgcttcaatacaaagcaggtgcttacagcagtaaacgctggctgaccatttacgttgataagtcaacgggcgttatgactcaagtcaaaatgaaaggtaatcaaaatgagtgatcggtattcacacaagcgaccgcagaacaatctgcctaacatagtaatcattgtcactgttgcattaaccgtattgatgattattgcttgcatttacatgtggcataattcgcagaaacagaaagctttagcagagcaatatgctagacaatacacacagttacaagaaaaagaagcaaatttaaaacctgacgttacagcaattacatcaggtaaatttgacctgcaaggatcagaaaaatctttagctaaggattatacggtcttaattaaagccctgttcggggatgcatcggcaaaagcagttaaaaatgcggaaaatagctatcttaatcattttggaacagatggttggcatgatctcaaggagattgcctttgctaatccaaattcattagttgcaacagcaaactctgatactaaaattacttttaaagattttagcttgaaagatcaaaccatcaaaattgtaatttatacacgttttagtgttcctaaatctaagtcatcagcaggctatggtattgcctatatcacaacgacctataatttcaaaactcatacagccagagatacaactgtacagagttcatttgcagatgataattaaggcggtgactatttatgacttctaaatggacgaaaaagaatatttttattgaatttgtattagctactctgtttgcattttctctcgccctattctttattttttccaactcaaacggtaaaaataaaactttaaatttagatcagcaagccaaggttgcacaaataaaaatgcagattgatgataaacaacatcagcttaatcaagaagcatatcagaaagctcttgatgatcccagtcaagtggtcaagatgaatgttcgccagattcaggcttctcaattagctaagactcaagctaacaagctttttccgatcttgcttaatttttcgacttctaaggaatacaattccagagctgataaatctcaaaatttagtaactgaaaatgttttgcggaataaaaatctgtatggttctgattattcagatggttctcactatgttgacgcatcggggtatcattccaagtttgacagcgtagaaatttcggatggcttgcttaaaggcaatgagttgccagtaattatgcatgttaattcaattaattggttctcagggcagcataaaggacagactggtgatatttatgtaggtacttttgattaccaatcgcataagttctcacaactacaaattttaaacaatctttaccgtggtaatttgaccgttaaccaaggacaatagtaatttttaagttttccttattttttaaattttttagcttaaaatcaggctaaaaatcctattttaagaaagaggtttgattaatatgttatctatcgtttgtcgaattataggtgtgtggtttgtcgcttgtgcgtgcatcctattccttttttgctttgcgcaaagaaataaattcgattttcaagatggaaagaatgctgttcaagagttgtctatctttttttgagatttggcttcccttaaacctaatcggtttttcagcattcttttttgctaatttagggtaaaagtatgcagaatgtaattacagttttaaatgctttgtttttaactattggttatctggcaggtttttggggcctgccagtcattattattctcagcttgacttatatttgtcgggacgctgaacgaacattggaccgtacagtaactcctaaagcggagatttactttggttttattggcataatgatacatgaagcaagccattggcttttggctaaaatttttaatcatcaaattatcgattgcaagttgctagttatgccatgggaagttgatctttctcagtcccaccctcagcttggttatgtgcgtcacgcttatagcgatcgttcattttgtcagatggttggcaatgctttcattggcacggcaccgatatacggttgtacagccatcctgtatctagtttttcgcttatttatgccccacctatttaagtttttgacggatacaactagtttattgctacatcagcccaaattgataaatagcaattatttgttaacttatcttgttcaagtagtctcatttacccctagaagcctatttttgacttttatagcgcttttgctgttaatcaatataactttaactggatttgatttaagcgacgcagacctcaaaaatgcacgtacagcagggatgtggattttaatcatattagctatagttattttcccactggttgcaagtggcatgactagttttcttaatttttacttaattgcttttatttcatggctactcacaacattttcgttatccctagtaatagcagtcttagtaaatgttggctgtcatgtattgcattttttcacaaattgagcctaggtcccataaattagtaacgcactttagaattaaaaatgtgcttagaaaagcatgattttttaatttcaaagaaagaggcaaagactttatgagtatttcaaaaaatatcacatctttgactggtgctacacttgcagttgccgcaggtggtcttgctgtcgttaatactcctaatatgagtatcgttgctcatgcggatgaaactcacgatcagaatgtctctactgatccttcagtaggtgataatcctgttcaagatccaacaaaagtgtcaactattactgacgcttataatgacattcaaggtgatactgcacgcgataccaatcaaatgcaacactcaagtatcggctgggagtaccaagaccctaatcaagcggccgaatcatggaaggctccagatgataccaaggttgagccaggcactgacaacactcaaactgattggaatattgctactgggactaacggtaagagtgcatcagatacttcctatgatgtaactggagattcttccgaaaataaatttaatccaggtaacattaacctttatggtgtaagtgctgtgtcagacaaatctgcatcagttcgtgaaaattggcctgcaatcgaaaaggctaacatgaactacgatgactttattgctaactatggatcatattggggtcctatttattggggttggtattcacacggctacccatatgcaattccttatgcttatccaggctacggctatggctacgtaggtggcggtgctactactgttgtgaataataacaacaataacaacaataacaacaataactcatcaaacaacaatggactcaacagtcttaatggtttgaatgcaagtttgttagctgctaatggtgccaatggtgctggcggttctggtaatggcggcaataatgctagtggattgaacggtcaacagcaaagtggtcagcaacagtctcaatctggttctggcaacaacagttcttcaagttcatcatctgctaactcacaaaccactgttttacctggtggtgctgtagttcctggagttgcaggcggttattatggtgttggtggtttaggagttgtaacttcaaacaacaataataacaacaataataataattcaaataacaattccaataacctcagttcattgtctaacttatctaaccttgcttctaacaatgcgggattagcaaacaatggcggaaatggtggtaacggcaacaacggtaatggtctggtaaacaatggcaacaatggtgatcttggcaatcaaaatgataaagatttatctgctaagaaagctccaaaagctaagaagaatactgacgcattaacccctgctaaggataaaaccgctaatacggccgttagtgataatggtgcgcaaactccttcaacggatgcaaacgcaacctcaactactggctcaggttcgggcgatggttcaggttcaggtaatggtgatgttgttggttcaggtgtagttgcttcaactggttctaacgcaggttcaggtagtgctgtatctgacggtggttctggttcatcatcatctgctctgcctcaaactggcaattctcttaagttgcaaaagagttccgctttgggtgcaggaatgatcgctatgactttaatggcaatgggcgtttcaaaaaagcgtcaaaagtaaaaaaattgatacgttttacaaaatacatgtgtgtgtaatacaaaaagacgacttttaatgtcgtcttttttttgattttgagagaaaaacaaattcattctgaaaagttatagattatggtcataccttttaaaaatgtcagaaggagttaagaatttaatatgaatgcaagatttttagtagatttatataattggtctaatcctgctactggctatattgctatggttaatatcggttggatcgttattgtaattattatggctttagttcaacataaggacctaaataaatgggttgccaatgatcctaatcatcaacccgataattggcagattccattggtcattatttttgttcttgcttgttctgcccttgcagtatactttaccccttattggttacctggtgggcttggttggtcaacattcattatccctgttgcttgctatggagctgagttgttctttaccaatgattatcgaaagactttatcaaagcatgtttggaaaacttggtattggcgtattgtgatgtggggtgaatggctagttgcaattaattttgtttttgccacagcctttatggttttatcacggattgtcactaactattaagctgaggtgtttgatatgtcaatttttagtaaattctttcatcattcaaaagcaaaaaagtctgaggtacgtaaattaaacgggaaagtacaaattaacccccctataacgggttatgataagcattttgacaaaacgagctattttgtcaattacactggcgtagcaaacgaaaataatcctcgcttgtccgcaccgtataagccaagtaattctaattagctagagcaggactagacgcagaaaggaacttagtaaatggcgtctcgtcgcaccctagatttaaaggccgaatttgaaaactacaaaagtgaaatttataccatgctgattgcacttggttgtacgcaagagcaagcaattgcttatattgccgacaatgaggaaaccatccgtagctggcttgatccaaagagagggcgcattattaacgctcaaatgggagctagattattgctacgaaaggcataacaatcatgaatcatcgtcatttcaattttatcggtctaattactactttgattgtgatcgcaattattgcaggtatgttattttacatttattctttaagcaaatctgaatcgggtaatcctttgactactccagttcaacaagaaaatatttttgataatcttaaagacattgtattttctaaattcaacattaagtagaaagtccttaggggcttttttattttgcttttttgatttttcgctgaatcgagccaagaacgtgtattttctcttttccacttacagttaaaagtacggaaaggagaaaattttatgataaaaaaaatccgagaatggatcgaaagcttagtttctaataaggaaaaagcaatatctttcctagattcacttgatttagaccaggcgattatgacttttgaaagcttgcaaaagttcctttggatcgttccttgcgtagtttggggaatccatgtaattctgttgcttgtccctgtccttaatactctgaactttcagtttattttgttattgctgtttctagtatgcgttttaaatattatggcgtgtttaatcattaaccgctatttgttttatttttattccagacaaccaaaactagatccagttgaaaagattaatactctttggtcaatccaaaaggtatcagatttacaaagctgtataactgaaggggcaattgttggtctgcctgttacctttactatcctgccctatttagagtttttacgcttgcatccatctattgcaggctggactacggcaatgaccgatcaattaagcggtaatccgcttattttgcgtgtgtttatctttacgcttcctgttattgcaactttctacttttttgaaagagttcgaaaccaggaacgtcaacaaaagaaaaacattgatgattggatgggacgtttccagtatcacaaacgagaattgcactctgttttgtccaatcgtcctaaagaaacgcaaaaaatggtctctccagagccttacttaactttaggtacttcgatacttaatggcgatattgtagaacaagctcctgttaatcgactgcaaaatgcctgctattttggaccggttggtgcaggtaaaacctctacaatttttattccgcagatcaagcaggatattgaccactatttgcgttttattcgagattatcccaagatttcaagagatcccgattttatgaagcgtaaaggcaatgttgctactcgctatctaaatggtttgattgtcattgaaacatctaatgacctttgtgctagtgtctatgatttagcaattaaaatgggcgtgccaaaagaaaaaattacttggattgatccatcaaatccagagtcacctgccttaaacctattgcgtgggcctgtagacacggttgtagaaaccgttactaacatcattgcaggggttaaagctgataacaatgatttcttcaaacagtcggaaagatcacacttaaagaactttatctttttgcttaaactgtcttgcgtagttgaaaacaagattgccacttttactgatttaatggctctatacaatgatatatacgtagttgtagatcggatgaaggtgttggataagtatgttcaagcgctaaaaactaagatgaatgacgctaaagccgattatgacgctaatcccgatagcaaagcttataagactcgttatcaagaaatttttgataagtacgagattgcgtatggtactagtcaatggttccacaacaatattaaagttgctacttttggtcaaggtgtccttaaacaaaagtcaggtccgcatgaaggcgaagtaatgtacgttgatgagcaagctgaaaatgtacaaggtttaaaaaactcgctagacgacttatccaagaaccaatatttgcgtagagtactgtttagagacagtggtgactttaactttgacgatcaattgcgtaatggtgggattatcctttgcaacaccgctaaagctgagttgcaagatcaattagcaggacgtttaggtcaaatttatttaatgagctttcaatctgctacttttagacgaatgccaaaccgtatgccactgtttgctttgtattgtgatgagttcccagattttatctcagaagccttcaaatcatttgtcagccaagctcgtaagtattcggtaagtaccactatttgtgcgcagtcaccgagtcagttatcatacagctttggtcctgacttctttaacacgttaatgactacaatgctgacgcgcgggactttcggagaccttggtgcttcggacgctaaattgttggagccgttctttggggagcattccgaagtagaagaatccatcaatgaacagcaagttgacctgactgccgatcaaaatagcaatcgaaagatgatttctgctcgcagacaaacggtgccaaatattactgctaatgaaattatgtctttgcctaaatttacgattgctttgcgtcaccctaatccacaaggctcagtgatgtttgacctaattaagacgcattatcttaaagacgaggacattgccaatgatccaaatatctttgatattcataattctagggactatgaagcatttgaagatatgatggctcatgcctaccatggtaatgccgactttgacaaggtagatttagagatcattgatgatattaagtcaggtaaaattgaatttagagatactggtaaaggcaaaaagactcataaaactgtaggtgcttcggcagatgatgatttaaaaaatctgcatcagaaacataaagaaaacagccctaaatcaaatagtgaatctgataataaatttgtttcaaatgattctgatactcaaaacgagcaaggggtaccacaaatttttagcgattttgatcctgatgatagtggtcctgaccttagtttggtacatcaaggtgaatcgaatgctgaaaaaagatctaagtttagagccttggctagcgaagcagtaaacaaaactctaaatcatagcggacagaatcgtcttgataatggtgtagaacaagatgaacacttacctactaccaaacctgagactcaaaaaaatgaatctgctgatgataatacagatttttatcaagatatgattgataacatttctacgaatgatacgtcagaaaaacctaatgaagaggtgtctgaaaaagatatgatttttgaaaaagacggtaatttatacgagaccaaaaaggaccgtagtcaattgcaccaacaacaagcaggttctgaagaagcccaaatgaaggccatcagaaatcaaaccttgcatgacttagaacggaatatcaaagacattcaaactgactctgctttaactaatgcagtcaagcttgatcgcttgaagaagctatataacaagaattacgagcaaattgtgaccatctggcccaaagatcatgatcggattctaaatagcattaagcatcagatttctaaaatgaaaacacgagtagactccgcccctgctccaattaataaagacgataatttagattcaattatgaaaaagagccgtgaagctggctcaaatcaagccttagcagatgaattgtctaaaatgcttgatgattttgaagaccgaccggtaaccgttgttcctgggaagcttaaagatattgcagatgatggatttatcaattccagtgacccatttaatcaacagcatggaatggatgatgaataatggctaaattaactttaaatgtcgaagccttagttagccaagatttgactaaacgtttattgtttcagcaggcaatttctcagaacaattctgcttgtgttcttgctttaaatgatatttatttagccgaagcaaagaaattattgcaaggcaaggccttatttgtggatgattatcctaatgacttctttttagatcacaaaatcctaaatgatactgctaaacgtaatgccttagctagggcctatatcgtgtccttcaattccataagagaagttaagttggcacctgtctttatatcggggatgcttcttttattagatcaaattagtttagcaaaaaaagtaactgtctttgatgtccttacgcagtggcaacagagtgatgatgaacaaattctgcatgagattaatcatatgaatgtagaaggacttaataaaacccaaaccgatattctaatggcgattattcaatcattgggcgttgaccgtatgcaatcatttagaagcttactcaaaaagttttggcgcatccatgctaaatatgctactggcggtaagtttcattctccgacagattggattggcaaaaatcaattagttattattcctgcttcaaaagcagatgttaattcctatgcaagattagtctttaattttgctttagaaaatcgaatggttactctaattgattctgatgttcctcaaaaggcttatttgccttttatagctgatttaaagtcaactatgtatatttcctctacaaaaaatttaagtggcttacaagtctccaatttggcatatcaagcttctaaacttaatatgtctattcagagttttgatgcagaactatttacaaattggctaggacgttactatcctgctttaattggtgattattctttacgagactttgagcgagtatttgcagaatttaagcttgcaggctatcttaatgcttttatcagcgtggaagataatacattaatattaatcagaattgatgaaaacaatcagttagttaaacaaaagttcagtcttaagccgatcttggagcaattagataaagctattcctgctaaagtgaccaagcaagatggtagtcaagacatcatggctcagttacaaaacgttcttaagaatcagagtgatttacagacactcattcttaacaaattgcaagaaattgaacaggaatttaatgctcataatcagcaacaacttacccctgctaaattacctgatatcatgagcgatagtgaggttattaatgatgagttcgaaaaagctttagcaagacaacgagaaagaaaagaatagcaaacaaaaaagcaatgtttcaaaaacattgcttttttgttgtgcctagactttacgaactggattagataatttccttaattatcatctgcagggataattggaatgtatttaagccacatttgcatatacattggtgtattgacttcggacgcacagattggctttaaactcttgactaattgtgctaagtcaagatcatgataggcaaagtgatatttgtttttgattaaatcagttgcctttgctccttggtctagccatgccttaggtgcaatagttaatgtagtaccgtccgcaaagatcagaatgataaatttactttgaccaataatgactgattgcaacaaattgagcgttctacgattaagtgggatatatgtctcactattgtctttaagatcaagtaattttagagttttgactgtcatattgtccaagtttgcgttcagttctactttgagtttattagcttgttcaagccattcagtagtttcaaaagtagcctgcaaatttaagaagtcattgggtatagtttttctttcgtttgtttcgggactttttattgtttcttgtcttttttgtaaacgtgtttctgatgtgaaattatgtttctgttcgacacgattaatttttgactgtcttttttcatcgtacctattctgagatatgaagttttcgttttcagattgctcttttttcataggagtcgatttattagttggtcgtggcttggcaacagccgtctttggctccataacgttgtgattgattcgtgaacttctggtattaagtgcttctgtatgagtagagtgcttgggaactggtggaagtgtctcaaaatgacttgtagttggtaacttttgttcgttttcaattctgggtgctttagtattaggtccccaatcttgggaatcccaacccgctttgctaaattgttctttttctgcttggggcttaggctggtatcgtggttgcgtattttttctttgctcattttgtaatttagaaatagcgctttgtgcatctgcattttcttctgatttaggcacatagtgagttaagacataatgaaaatgatcgctatttgcccgataacttctcagcagtttgtataaataactgtttttataagcagttaatttcttagatgttactagactcatttgatttcttccttttccttaaattttgaactgaatttagtttagcaggctttggagagcatttttcccctactcaaataaagctaaaattcaagtcattttttcttataattttctaaaatggataatttagaaaaggagtcgtttatgtcagaagtttctgaacaaattgaatttaacttagcccatgatggtggtaacggctatatgaaggacagacttaatgggcaaactactatttttccttctgtattagcccgttttttgccaggaatgcaaaacaatattatcaaggctagcgatactaaagaagttcaaaatttattaaataattaccttgacgatatggatattactgtgcaaagcaatggaattaattctaatggtcgatacttagtcggtaaagctggaattaatagtggcgctcctcttatgacctttaatgtgtcgagcgttgaggggaaaagtacttcggatattagtattatttccgctctctctttagtagcttacaatgcagtaaaagtctactatgagcagtacaataatttgcctgaaaatttaaaagtggaagtagctaaaatggcaaccgatttaccaattgatgagacaaaaaatagatcaattagggaatcttacattactagatttactggtaatcaacatatcgttgtaattaataactttgataatcccattaccgttaatgtcacctttaaaaaagcttttttggaagcagaaggtgttgttggtgaacgtggattaattatgtcgcccactaacgcagggatgttaagagatgataatgtttttcaaccattaattgaagactatcaattagatagttttgacggacaggatttaatggaagcaggcaatactattggtgttgatattggtgacggaacggtagatttttcagcaatgaatggcttagctagtttacctaatatgaacgattcactgaatactggaattggtaatattgccgaagaagcaattaacgctttgcatcaagcctatccagctattagacgtttgaatcgacaaaaatttatggaaatagccaaccgtggcaatgatgaagaaagcagaacttatcattcttttctggatcagcaaatgattgttttgaatcaacaaatcatctctaaaattagtactttgtacagtcggttagaccagcaagttgggatgattattattagtggtggcggtgctgttgcactaaagcctacattaagtgccagtctcaaagagacaatgaagcaattagatagttttaacaagactaagattttttgggtaggtcctaaatatgctcaaactctcaatttagatggactggaagctagaattttgataatgtaaggtgatttttgatggtaaatcaaaaacgaactaagcgttcatcttcaaagcaattacatatcttgctgaatgagactaaagatcatgatattatcgattttctagctaaacaaacagtttttaatcatactgcactaactaaactagctttgcgtaacttaattactagttatggtaatgttgatttaatgtctctttttaataatttaggatcaaattcaagtaagtccactttagaaaatgctttgggtaatgttaagtcaaaaaaacatactaataaggagcatcattatagttcaaagccaaaacaaaaaaataatgaggaaacaggtagaaagcaaaagaagaaaagtgatagtggtttcaataaaaaagctaaacctattccaatggatcaattaaaatttttagatcccgataatcttgacgatctataatttagctattgtcttaatggatgatgtcttagaaaatataatatttattcatccactttacagctttaaatcaggtctagtgaagcttgactatcttttttatagaattttgatatagtttatttgcggtatatactatttctatcttatttctaccatgccaaacaaaaacatgtaaaaaaggagtatcagcgtctgctgatactccttttatttctttaacataatgccatatgactattgtatagcattatactttctttctcaacttttaagacaagcctgcgtcgtttaacagatcattatctgtatcattatgactaactttttttggagattgtgatggcttttgagtcttttctttcgattctatcttcgtatttttattttgctgatttacttcttttctcccttctacttcatgtttggattcagttaaatcgttaaaattagatttttttcgttttaattgtgcctcatcagacgtagtagaagatgtaatatcacctaaacttaacttctgggttttagcgacctgagaaagcgatattttaatcagatcttcatagccatagtttcggatagctaaatctattaaatgcttaagagacaaagttttgttactttgtgcttgtgcccatcgaaactcaggacttttaggatcaagtttcaaatttagttgtttagccatttttcacatctccaatatgtttaagtcaatattattattcaaatttcttagctaaagcttcggcaagtagttggagtccaatttcatttaatttttgagcatattctttatctacccaaacaagtactgccgaactcataaagctttctagtgctgattgcagttgttcttttaagtctgtttgttctcctaaaggaatactgccaccaccgaaaacataaattacttctaagcgattgttttcgtttaaagcgtcatttaagttctgttttatactttctaccaaagagccagtactcgaagcaaccgcttctgttgcaatttcttgtttttctttgtctaatttagttttagcaggctcatttaaaacattggtaaattcaattacgtctttacatggaaaatgtcttctcatttttggtaagttcttccaagcataacgtagaactgtgccatacccctcttgaatagaattggaagccgcaagatcagctttaccgttgctagtcattgccatgtcagtagtcccttgaccaatatcaattcctagcacattcttagaatcttggattaagtcttctgcatcgtccgcacggtctggatagtttttcttaatatatttcactagagaatttataagctctctagggccatgttgaatgccgattacagtagcaacttctccttctttgaagactcttacggctacaaattcaatcgtaacactaattggcgtgtcaaaattgtttaacacaactacatgctttcctttggtaaatctattagcgtattgttctctaattgtgctttcagctgatcctacttcgttgattggcaatgcggtggtcatgactacttttacggaaataggatcaaaaatattttcacctttttcgtaagcttcttgaaccgctttacctgcaataaggcttaatggcaaaataagcgataaatcggtagatgattttccattttgcgaattaatatcgaaagtagtacgtgcgagagttgaattgcttgctaagagtcctactaggtatcgcttcatattaatagtcgcatccaaattttcaagcagggaattgacggtttgctctactcgattttcatcattatggtcaacaggatcgtttcctgcttgatcttcaacttttgcaactactgatggctgattgatatattcaccatcaatggaagctttaacttctccatatcccaaatcattcgagacaatcattaatttatttttctttgttggcattatgtttacctctttctttattaaatctatagtcattctagcattattatatactgtgtgcaacagttttcttgttacttctttttgctgttctactatatttattcacttatgtctgcacactatattatagagccttattcgtaatatactttttttatactattaaagtatacttgcctaagccaaaatcaacagatttttatgtaaaaaataacacctggaaagaactgatttccaggtgcttatttaagttcgatattatttcaagttagctatcaatctatatcctaagaatccgttgctggaatttggattccaagcaatacctacaccaatttttgtatattgactagataaaagaatgtctctgtgttcccaatttgagcctgcatcatgataaatgaaattgtctaaacgaatttttgcttgtacagatggggtatcagtattatctactgcacctccagcaagcacttctgcgtattgggtgtggcttccgtctggtcttgcatgactaaaacttgtaatcgcttcggtagctctagttctggcatactcttgtaaagaggtatcaagtgctaaaggatttagtccttttgattgacgtaattcatttaattgtgcaataaattcttgttctaatttggtagcaaaatcggaatccttaatgtttgtatattcattattaaattttgtatttgtggtttcattatgctgaatagaactgcttgaattagcatttggagtatttgttgaattagtttgagtactttgagttgtattaacattttgtttagtggtagtttcagcttcttgatgaaacttctcagttatcttatgtgttagctctgaattaatccacttattagtaccaaccttgtaccatgtcttaccacggttatctttcttttttgcataaacattaactgtgccatctacaaaagttttagtaatgtgcttgttaggcaacttatacgcaggtgatggataaactacctctactttaaataatgctttattggcagaattttttttagtattggctaaattaatatagcgatggttcccaatgtataaatattttttaccacgaattgttttagtacgatatgcttttacacttctgcctttcttgagtgttcttgctcctttaatacgcttgcctttgtagttgtaaacataagcattgtgtgtaagccttacgcttctggtgcttgcctctactacattgacttgttcattgccagcaacaactgtagctgaaagcaatagagctgatgaaagcgtaatagtcgataaaactttagtgattttctttttttgtaacatgttagttacctcctatatttcttatttcaatttctaaattaatgatacatgatgaaaaaatacatttcataaaaactctatgatttcttcaaaaaagttggatttttatgaaattggaactatacactacaaaaaacaaaagtaaatttatgataaaaatacagatttcgggggttatctgtgattcataatccaacaaagaaggagacttaatatgaaaagtaataatgactttgaaagtcataccacactcaaaagtcgaaaaggtctaaaattcttttcagctctaagcatggctttgccaattttcatgcaaagcggtcaaaaaatcttcgcagacggtcaccactacttagaagtgcactccattcccgttaatgttaaaattctccaaaactcatttggagaacgtaaaggtcaaatggcccgtgtttacagtatttctggcggtttctgggaagatcaacataaaggtattcatggtaaagtcggcaatagagatatgcgtttctattgtcttgagcctaataaggttacccctggccctggtacaacgtccaaatataaaggcaaacaagctaccaaagctgttaagcgagttttaatggttggtttcggtgctaactctgcagaagaaatggggttcccaggaaaatcatctgaagcagaatatgctacacaagtagctgtgtggctagcatgcggggcaattcgttcagatattaaatggattaatccaactgcacataagatctttaactatattcaaagtgaagctaaaaaaattaaagatactggtgcaactaagttaaagctcactgcttcaaacgtaaataaagaagaaggaacagctacgattatgcctactttaaccgaaaatggtgaaaagaaagcaggggagggtactttaaagcttacgggtatgactgctacccaagaaggtcatgctgttactaataaggctaaggctaattatgctattaaggttaaattaactgatcctgcaagtggcaaaggtagtcttagcatgacagttacaggtcgatctttgaaagcaccaatgtacaatgctgacagcggaaactcccaagatactgtttcctttgttgctgttccatctgataagattactaaaacttggagcttcgctcctgaacaaaagccatatacgtcatctacaactacttcaatcaaggcaatgtttgacttgaagaaaaacgatgatgagggcgatcaggtcgatcaggccaaatttgacgtttacgagtctgattccaactggtctcaaggcaagttcatcggtaccattactaccaacaaaaacggcgtagccagatcgggcgagcttgatcctggctactatattgcaatcgaacgtagcacgggcaaaaatctggacattaacaagactccagtccacattgacttaaccgaagccaacttgaaggaaaacgccaaggtaacccatgtcaagactccagacggcaagccttacgacttgtatcatctggatgtggacggcccgatcaacaaccacaagaagcccaagatcacttctaaattgaccaatctggaagacaatacccagtttgctcagccgatccacggcccagtagccctgaacgagcatctttacttctcccacctggtggggacggtaacctacaatgttcgtgcctggctgatggacaagacgacgggccagccagtaacgatcaatggccaaaagatcgaagcatccaagacgattgggtcaagaaacaatgacactaatgatgatggtatcgaagaccagactgatttacagttaaagatcccagacgcatcaagtttggcaggtcatgacattgtggcctactcggaaattgcccgtagcgataagccagaccactggacggctttgcacgaggacatcaacgacaaacaggaaacggtccacttctctaagccatcgattcataccaacgcggtcaacgcagaaaccaacggcaagaaattacagccgaccgatggcgagaccatcaacgatacggtaacctacaaggagctgatccctggcaagacctatactttaaagggaattgtgatggacaaggaaactggcaaggccgtcttgaacaatggccaaaaggtcgaatttaccaagacctttacggctaatgacgctaatggcgaagtcactgcatcagttaaatttgacgctcaccactaccgcaaccaccgtttggtagtctttgaaagtctttactacaccgactacctattaacggatcaccgcgacattaatgatgtcaaccaatcgcttgacgtaaccaatccgcaactgcatactaccttaagcgacaacacgcagaagctggtatcgcctaaggccctgaatacggttgaggatgtaatccgctacaccgatttgattcctggccaaacttattcagtcagaggtaaactgatcgaccaggtaacaggtgcccctgtcatgaagcgcggggttcctgtcatggccacggctacctttaagccaaacatggctaacggcacggtaactttaacctttgtttttgacggtacccaatatactggtcaccacctgactgcctttgagagcttgtacacgaacggcagaattttggttgagcatgccaacctcgatgatgcatcacagaccatctcggttgacaacaagcatgacaatgtaaccccaaccccaattcctgttccgacaccaaccccaactccaggcggtggcggcagtaccattattaataacaataataataacaacaataataattcatcaaataacggaaacaataataacgggaacaacggaaacaactcatccaacaatggatcgaacaattccgctaacaatggatcaaacaactctggcaacaacggtgccaataacggaaacaatggctccaataatgcagggaacaatggcaacaacggctacaatggttacaacaatgcaggaagcaacggtgccaacaacggcaataatggcgcaaacaaccagcaggctgttgccaacaatggcaatagccatgccaacgttgtccgtcatgcagttcggactagcaagccttgtcaaaacaagcgagtagctcgtgccaacaatgcttgtcaaaacaagcaagtggctcgtcctaacactgcagtagttaagactccagcccgtcagactgcacctgcatctggctcagtcttgccaactgcttcaatggttgcccagccagccgaaaagacagcttccgcaagccaaattttgccagcacaatcgcctgcttcatcaggcacattgccacaaacaggctcgggcaaggacactatgcttcaaagcttgggcgctgtaaccttggcaagtgcaatcggcacctttgtctacttcaccagacgcaagcagacaacaggcatggaataaggcgaaaagaaaaagctaagcaaaaacttagcttttttcttttgctttttaattactgcccttcttagcattttatgtcgattctatcgagaatatttaatccagtgaaaaagaattctttatatttttcaagctttagactaacttatacgtatttttaacttgcttgttaacctaatattaacaacgttttagcaaactaatgatttaagaaaggacgatttcttatggcagaaaaacgattaatggatatgcttaaagaaactaagacagataagacagaaaaagcagatactctttctaattcaaaagaagaaagggaagcctcaactaaagagttaaatttagaggtttcaaaaaatgaggataaagaagaaaaaactttagttgaagaccagtctgctgataaagtggaagaggatacttctgaaaaaagcgatggtattcccaaatatgctgaacgacattttgagcgaagcaataatactattcctgactttttggaatcagcagaaaagatacctgtttatatgcgagaatttgttgctcagcatagacggagaatgagttctcactctaaattaagcgaagatgatttgctttatgcctacggtgaatccgtagatacttttaaaacagctaatggaaatttgactatgctgaaaatgcgtattgaagctaataatgctccaatttatgtaccaatgaatcatgcaggtgccaattaccgctatctggaagatttagtcgggcaaaggcttaaagtagcgattgaccaatttgtacaaacaaatgaagctgaggtagacgcagagtatattcttctaggctccttgcaacaagctgagttcgtgattggtggtactcaatatagcgaataccttaaggatccccaagcttaccgtaaagaggtacgtgaaggtgtgattactcaaattattgaacgtcctgaaagaatgatcgtagaagatggcgaacgtaaactgattcctaatcggagtatggtctttattgactatcgtggtatgacgattggaatgcgtgagcaagatttttactatcgtagtttaattacccctcttcataaacgagcttttattggtcaaaaagtaaaattcatggttactcgaattagaaagggcgattatcgtgattccccaactgcacaagaggacgctaaaaatggtatgaatgtaccacgaggcatccgatacttctttgacaccacaagattgccgttagtgcctaacccaagtgatattgtacgcaaaaaactgaatcatcacactattttcattgctcatattgtccgtgtagacagcgttaaaggcatcttagtagaagtagctccaaagtactggattaaaggcgtattgccagctaattcgcctgtacagccaacagctttagacgctacggctcatactcccgtagctgtaagattgacaggaattgattttaagactaagagtggtacttgccaaattatgcgttttccaaaaggtattgctcgtccaggtattgcttcatttatttaaggagggaagattatgccagaatttactaaagatggcagtagcttaaaacaatttaaagataatcttccagtcaccaagctagggttaaatccttttgttaataaagatacagggcgaacttacttaccatcattgtttacagccgaagaagaaaaaaagtttaagatcaaccgcaattttaagcaaagaaaatatctcacactacaagattcggtatctcacatctattcatactttattgctgatgattacaactatgtaatgactcagttgtcagaccatgacctgtattggctaaaatttattgcacgttttaagagtattcaacaagtgcaactttttcgtcaaacagctttatatcccgattggttcgatagaaaaagtttaaagcattcactagaccgattatttatgtatggtctgatttggaaatggaactttaagcgagactttctaaataagcctgttacagcctatacactatcggttaatggctttcgctttatggagtatttctttaatcaagaacgcagatattttcagccccaaagctattttactttgccagtgcaatatcacatccgattctgggaaactgttgacatttatcaattatgtttaagcctaccgatctttcatggctttgagactttcctaaatttaggcaaagataaagaaaataaaatcaaacgtaatatgacttcgcctttgcaaattgctttagaaatgattcctaatcaaattaaaaatttagtgtttttcccagctttgcaaacagatgatttaacttactatcaaaatgcgttactcagatggaatgcatttacggatgatggtgctaaccttactgaatcggtcaatgggttacctggtacacaaaatattattgtcttttatgctccaacagttgccatagctgataagttaaatacggatttagaacttcctaactggaactttcctattttcttattagttggatccgtaattgaaaaagatggtattacacaagctttttattatcccgatcatcgtaataaaactcttgatttgcaaagagctactttacccaatttagtgttttacaatcaagaggagagtggcaaaaatgaagaaaattaaaaaaactatcttactatctgtgattgctgtttgctcaactacttttttgacagcatgtggcaatagggcaactacaccagttgctcaacaacaagccagaagatccagtcagcagaaaagtgttcagctgggtctctacgtaggcgacattgctcagtcggagaatgtattatcaatgcctgtagttgttaataacgcaggtactgatagcacagtaatttcatcgcaaaacttcactttaataattgacggtcataagtttaaagcttttcaagtcccagatgaaccatctgactttcaccaagacttaggtaccacgcaatcttggcaaaatgttatttcattttatataggaacaaagctcagcaattccatgctcaagaaagcacagctaacttatcaagctgataatgggtctactgttaaagcacaatttcttagcagttccaatgcacaatctaaattgcagaatgtaacttattctggctatacttcggtaccagattattatgctaaatctaagcaatatattgataatgcaaaggaaactgttaagacaggcggaagtgccaactccttaaaagatgggctaggggacgctaaatatgaccgctttagaatgtggggcgttgcctcttcaaaattttcagatttaatcattatcaaagcgattaacaatactaatactgacctgcttctacctcttaaggattttgagttacaggacaaggacaagaacgatatacaagtgcatcccacttaccgtagctataatgtcttgattccacatggtaaggcagttaatgtagtaataccaatggaagcatcccttaagcatagtgaaacgccatataagtttttgtttagagcaacttccagtagttcctatcaatcgtctgctgatacattccatccagcagagtttgtattcaatgacgctaaagactattccagtgccttggcaacaacaccagaacaatatccaaaggatagtattaagtggtcacagatcaaactgaccaaagatacattaaaggcaaaagtaaccttgtatgattattactttattaattcagatgcttctaagtatcgcttggttggacttaataatgatagaacggttggagactctgaaaagcccgactctgtatcgccaactaagataacaggtagtggcggtgaaataacatttaagtttgatgatttaacggtacttaagtcttataagaagatagttttgcgctacaacgatcaaactctatttaaaattaaataacaaagctaagtagtaattttcattattgtgttattgacaagtcttaaaaattctcttaaaatttttatagaaagtttaagtttaagcattaaaagacatataaggagcttaatcatatggagaattataagattggcaatttaaaatatttgcaacatattgatcgtatgaagattggtccaagacgtgaaccgttaatggaacatgtcaaacattgtccaggatgtagagactgcattatgtggcaagctgttttaaaacaaaaagctgaattgctagatcatcaagaattagcaggcggtatttccagagggcaagcatacgcaatgcgtaccactcatacgattcaatattactatcccgaaggtgacgagattaggaacccagatggttctttgaataagaacgtctacttgaaacttaagaacgttgaccgaggaggtagtgaagataaaaagggcggtggctttaccgatccagacattttccaatattttcacatcaattctggtgaatcaggcaagtttaaacacgaaaactttcctgaatggcgcgataaggataagcgtacagagtacctcgatggtgacggttatgacgctattaagcaatataatgaaaaatacggtgaacataagacaactcgtgtaaagcgggatcttaagttccattaattaataaagtaatttattaaagcactacttagcaataagtagtgcttttttgtgttttaggaggttaaaaatgagtatgtactcgtcaaacgagaacatcttaagaccaataagtttggctttagttgatctttttgctcaagcttccgaagctaaaaccaccattaagcatttaaaggtgatttacaagttagaggataagagctgtatggttgacgctaagctttctagtcaagtgccaattacagagattactaatgctttaatgagtcaaattgattatttgattaattcgctaatttccaattatcaaactgtttatcgtaataattatttgagcaaagtaatttttgaagctgaccttgatacattagggattgtttatgacagtgttaaagtgacttgtgttatgcgtgccaatcttaaaaacttggatagcaaggatttgatattgaatgctttagtagctactgtgcaagcagaacagtcggaattagttgagcgtcctgtaactggcttaaaattaaacttaaagcgtaaaaagcttcgaaattttgctttaatatttgattatgctaaagatccgcaagagagagtttatcaaacaggctttgttaattcattgattaagtctctttcaactttgatacaagcttattgcagttttacagaaaggcatcaagcaagtattagtctatgctttaacttgttaaaccgcaaaaatttgcaaatagcgcaaggtcagatttatccaactaagaagctcagactttttaatggctttgttttgccccaggaagcaaagtatctaattaagcaggtcgatcaaattttaatgttggttggcaattcaaaagtcaatggtttgcaattgattcggcatcccaatggtgagtatattagtcgttttcagattgtctatactgctgatgatatgattgctcaaaataatgttttagatattaatttatcatctagccaacaattagctaatatcttgaccaaaatcattgatacttgttcattaagcaaagatctgcatgattggaagagtattatcaatgcagatatgcagttagtctgcaatgagtggaaggtaaaaagtaatagttatcaactaattcattcatttaaagatccaagtatatctttcaagtcggctaaatttttgcttaatgatgtaaataataaggcaaaaggtaaagcagttattaatagcttttgtttagtaacacagcataaaggattacgagagctaggcattaatttgtctcagcatattaatttagaacagcattcccatcctatgcaggttccaactttaaatcaattctttaagccaaagtcaaaactttactataactttgctttaggcagtggtggctatgctttacagtcggaaagatacttggggtgggctaaatcatgataaataaatatattttgtttctggtagcagggacgaataaactgaaaggctttattaaccaaaagtctaattctcacgtgaaagatatctttaacagaccagttgaaaatcatgggaattttcaacctacgattgatttaattagaatgctaagctcaatcagtcgctataccgactggatatgcttatttttgattctaattggcttaggcattgtcgttagcagttattacggtaataacggtaaatggcgtaattcaggttatcggatgatttggagcggatatgcaaccgtcattattatccataccattattattgcaggaccatccgtagggaacctaggtaacatgaagctcttgatatttttctttatgctgttaggtcaattactgttctatgtagcaacttcttcgctgtacttaatcggttcccaacagctagaaatttatgagatgtcaaatcaaccatctaatgagcgtaatgcaactagtatgtacaatttcatgatggtaacgatgattgctggagcggtagcttatatgattgcggggttattctaatatgtttaaacaacacttagatttaattgatacatttttaaagtggggcttggttctatttgtatcagcctttattgtcggtttagtaatgtgtgctttcaatggatagataatgatgtttcataatttactaaaagaagataaaaaacgagacgataagcttctcaacattgagagcgtagtttttatcatcatgattgtttgtgttcttgctttatttcctgtctataactttttcaagcctttttttaagtggcttttactcctttttggagtttgcgccctaattggcttcggaatccgtatgatatggagagtaagagatattaagtcttttaaagataatgtctatatggacatgtttgaaagacaagagcaggaaagggcggagaaaaagaacaaccatgaaaaagaaaagtaatacaattaagcataaagtagttgaaacactgaaaacgattattttagcgactatgttttatgtgggtgcggccttgctgtttttaggatcaggaattggtcgctcttatatggtcaaacaaaatgctcaagtagcaagtaagaccatcactgttaggactgctgataaaaataaaaaggtcaaaacaacttatgacgctaaaaagacaaaatctattgacgcacaagaaatttggcgagctaaacaatacccagcctatgcaatcggtcgaatgtcagttccagtcgtcaatattcataatccactttttgcaggctttggcggacataatcaaaatttgagttatggtgtagttacagtggttccaggtagaactatgggtggtatcaataattatgtcttagcaggtcattatatgggatctgctggtcctgcaattttggataatctgcactatatgaaagcaggagatccaatttatgtcaccgatatgcataagatatatgcttatcaaactaaatccgtatcttattcgattaaaccaactcaaattgaagttgaaaacaatcaaaagggtaaaggaacaattactttaatcacttgttccgattttaatatttctcgttatggttatggtcaacatagaacggttgtgcagggtgatttaattggttctctacctgctaccaagagtaacttagaaaaaacggaacttaccgacaaagctaaccagtcaagcataaaaatggttaagcatactaaggttctaaatccatttacgaagaaaatggttacagttagaaaacctgctcaaactaagatttatcaaaacgtaacttataatcaaattaaggcagttttttcagttatagttgctgtaattgttttgattcgcttactctttatttggatcccacgcaagaacaagattgcatagaatattgttggcagattatgaccaattaatgttataattaacttgtaaatcattattgaaatttttattttttcagacagctttaaaaagttgtaacagcgtcacatttgacgtattaggtggtttatttagttttattgcttccattgaagcagtagtatgtcttaatgtagttcttgatttatcgtttggtaagtcatgcgtaaaaatttttaaaagttagtaagtaattaaggaacattgagcattttcgatgtttcttttttgatatgtaaaagtgaaaggtgtgattttaaataagaaattaacattaagaattgtggcgtaagtaatatttttatggaagggaaacaaaatggtaactaaattatcagagcttgaaatgcgttttggcggtaacttaactcccaatggtatgaaggacattgattacaaaaatcaaaatgtacacttcttgcgttttgcaggtgcattttgtcctatttgtggtcataaaacttggtgtcaagtcaatgcaactggtactaagattatctgtcaaagagttaagcaaacaaccgaatccattaatggatttaagtatgtcaaggatattaaagcgataggcggctatctgtacaaattggtaaacctggatgaagcagttaagtttgacgctaatgcgatcaattataaccatacttttccaatggcatccccaaaagtaacagataccatgtatcgcttattgctccaagcatatccattaactcaatctcatttggaaaatctcaaaaagcgtgggttaagtgatgaagatattaatcttcatcattcacgtggcttcggttctttttatttaaaaagggcagatggtaagccatactttatccaagctaaactcaagccaagtgatgatggcaagattatttgtctttccagatggaataatgtcctcaagaaatacaaattgccagagaatctatggtatggagttccaggtttttatttatcaactgctagctttaggggacaagatttttctttccctaatttttcaacagtgaacggtaaaaacgaaaagcacgctccagaaggaatgttgattccttattacgatgaatataatcgtattcgtgcttttcaaatcagaatagatcatcccaagaaatatgcagtcattaagcaaggcttacgtcttaatgaaggagatttaaaagtctacattaatgatgatgatacatattctgtttattgttatgcgtttggcaaaaaagaaatgattgctaaaggcaaattagatggtaaaaaggaagttactcttagctatggtgttgacgtaatgaaggaaaattatacttttgaagtaagttcagaagctaaatattattgggtttcttctctttcagagaaagacggtgctgacactactggaaagtggcctgttcaagttgcttataatccaactgttgctcagctcaatcctaataatcctgaagaacgtcaatgcttgcaaaaatatattgataagcctaaagcaatttgggtaactgaaggtggtttaaagggttacattactgctatgaaattatctaaagcttttactaaagaacaactagatgattacggtcgtgatgttttagctgttgctggtgttaattcttaccgcaagttcttgcctatgcttaaaaagttacatgtaactactgtaacaatcgcttatgacatggacatgctacaaaacgatcaggtggcagataattactccaatttaatcaatatgcttcatgaaaatggtttcaaagtacagttagctgtgtggcaaccagataaagcaaaaggcattgatgatgctcttagtgctgggattgaagtgcaagtaacaccgtataaatagctatctttctgaaaacaaactaagtattaaaagaagaccaatgaatcaatttgatttactggtctttttgtgtttagagcgaggtataaaaatgtatttgttacttttaacaaacgatgaaggcaaaactagtcaaattggcgaatacgaaaatattgtagacgctatttatgaaatgaagaaactgcaaaccgacagcttctaattctaatctggaaattggcattagggacttatatcatgaagaaacttatcggattgtctatcaagactgtcagcaagttaatcatgaaattcctgaattaaatgacttgattggtgaagcagtcttaaacgtgcaaaacaaaactaactaatgtagtttattaaagagaggtattaaaaatggaacgggaaacttacactaacctaacattaaagctggagaaactatacgatcatgagattgctttcatcatgaagaatgttattccaaatgatgatggctcccatagttggattaaacgctcagccaagattaagacagcctatgacattttaaattttgtcttggcagatgatcgggaatttgaagaatcactttctttattcgtgaagcttgatcttggtacagcttttgaagcagtcgtttattcaaacgcattacaatccgtttgggcctcatgtaactatgaggacaactggattaagctattgaatagcgcactggtcaatgttttcaaagctaagatgttgcaaaagagtagtattaatcgataactaaacgattgatataagtattattaggaagaccaataaatcttgattgatttattggccttttttgttgttaaagaggtacaaaaatgaaagaaaaaactattttgaaagatattgttgtcttgcttgaaactttggcaaaaaggtatgagtttcaaaactgtcaacgtgcaagcgtagatattagagatcttagcaattctgtcttgcctagagaaattttttcttgtactggcgttatgacagtcttacttaacaagattgagatggtttggattgttccaaatacacgctttatcttgacgactaagattcaaacgggagctttcaaaaattgtaaaaacaagaagcagattaaagataagctttatgcatcgttagctaattacttcgttaacttttcttatccagattgtgacaagagtaataacaatgcagttgtttacgtattggaaaatagttttgtcttagataaagctaaagctgagcaagccgttgcttttttgcatcatgtcggtgcatcccttaagcaggactatcctagtaacgctgatcgtataaatctgttttaaatgacgagagaggaataaaagtcatgccagaaattgaaacgtacgatgaattaatctcaaccgaaaaggggctttttactcaggacgacttaaccccttcaggcgatattaatggtaaatatctaaccgtgaacggcaaagtttatatgtgtgcctttgttggtatgcatgatgtctttggtggctatctgttagttatatttagagttaatggcaagctattggcgcttcacatcccacgtgaagatcttgctgatctagcaggtgatgattactttgaaagatctttcgatgaaaatcgagatattcttgagaagttaattaccgttgatccagacgagtacgtcaatgattggggtttgtatcgttacgcttagaaattatgcaatagagaaattaagtaataaatgtggagagaagcttgtgcttgtctctttttatttttggaggtaaaaattatggaaattaacgtttacgtaagttcattaggtgcatacaacgcaggtgaattaactggtcaatggactaagttgccagttgctagtgtcaaggaagacatcattgacaagatcaatggtgctgttggagatgaatactttatctcagactatgaagctccatttaaaattggcgaagatgattctttggaaaacttaaataagcttgctaaagcccttaatgaagaaaacgttggtagtcttgaagacttgtattggaaacttcgtgaaggtatcggtacagatgatactgttactcaatacactcggtatgatgatgacagcgatcttgaccagatgcttgcaggagagactccaacccaaattattaatgatctgggaccgaagtttaacttgtccgattcatatttatattgggagaatggatatttaaacacggcaactgaacaagaatttcaagcggatcttaaatttatggctacagatcttatcaattcctttattgataaatacaacagtacttacgaagattcaattagttttattaattaatgatgccgtaaagttagaagataagaaattagaaataagtatttttaggagaatgatttaaccatcattttctttttattttgaaaggaaaaaatcatgaaaaacaacattaagaatattgcggaagctaaagctgtaccagagatgtcaagaaccgagcttcttagcgtaattaaagaggatttagtttcaaagggtattactactcttgattatctgtttaatgacctaaatgaaaacgtgctttttgatagcttaagccctgttgctcaacacgcttatgttaaatttcttgctgatgaattatctgataagtcagataaattcatgaaatttacttcatctgttgaacttggcacatacttagcaaataagtacagcaatctggagcatgaagaactacatgttatttcggttgatattcataatcgtgtattagctgatgattgtattacagttggttctattgatcgcagtatagcagtcccaagagatgtatttcgcagtgcaattatgaacaacgcagctggattttttattatgcataatcatccatcttgtgatttacaaccatctcctaatgatgttcacttcactgaatccatcagttcacttgctaaaacgatgaatatccgtttcttagatcatcttattgttggtggggggagttacctgtcattaagagagaataagattttataaggagaaaatatgattgaagtaacaaagtctgcttcctttgaagaagtagcaaataatgtaaaacaaaattggaaattaattgctaaaagatacatccctagcgatgttgaaaccaatgtttatacttttaaagatataagcaatggcttaggctttaatttcaaattgccccatgaaaataagcatcactttaaagttgaggtcagactttcgttagatcaattaaagccacaaagtactcaaactttgcagagtaaattgttgaaggaagtcggtaaacagatcatttatgtagtcggcaattatcaaattgacgaagcttatgatcctgcctttacgaaaaaacatcattatggttatcggcagttggaagcattgcatcaggatgaagacattatgttggattccgcacaagcaatggttcttggcgctaagttctctgagtttaatcagagtgcagacgctaaatatgactttctggcaccatttaatgataatcagattgatttaattaaagctgtttacagtaatttaattaaaaaattcgatttgatcgctaatgtgattagttttggtgggtttagcacttctgtaagcaattcaaagtacctaatggctacgttgaagtttcaaagaatcggaggttctaaatcttttaccattaacattttttcaaaccaagttcgtaagtttgcagaaaaatttgcagaacatggtatgggcgaagagcaagcaatttatttcattattcgtacctacttgagtaaagctgttaaggaattctctactaatgagaatctagctccaaacttagagctagataaggaatcatacattgatatgattgctgatttccctaaacagtatttcaagcttttcgaataatgcttaagtaatagaggaataaaaagagcaacacataattttgcaatgtcattaagttaagacattgacaattaatattagacttttaaagcactgatttaacatttaattggttaaattggtgcttttttcgtacaacaaataaggcatagcacagattctgcttttttaagctacgcgatataaataatatacagctgatttgggcttaatatttctcttgtccttgcggcctggtctaattggaatggtataatagctgatctgaataaggatccgttcaaaatcttgcgttaaagaagaagccaaatacatgctctgaataatcaagcatgattgcttgaaattgatggcatattgatacttgcaatgcttttgcggaatataggcctgtgcatcaatttgactgattgcattaaacataatcatatgggcataaatttccatttcaataaatttatcttgtttggaatggaactgtacactgcctaaagaatacttcaatttcttgaaggaggtctcaataccccaacgcagatgataaagctctttaattctttttagcggataattttttcgatcaagattggttagcacaacttcccattcttctttgcctgatttggcatcattaattctaaatttgcaggctcgaaattttattgtgcataactcgccaaaatcccagcttagatcctgggtatttttagagcgatacttaatatattggcgataatgatgctggacatggtgaatattctcactggctttatgcgtgatgtagtaatagttagaagtagttaccaggcaggaaatctcacgatcacattcttgatcaggcaatgtcgttatttctttaactccgccttgtccagccttagttcgtattatgtaatgacagttaggcaggcgattgcagttttcaatcatattgaaactagtgtagccacgatccattgttacaatatatggaccacaattcaaagctttaagcatttgaacagccgctttgcgttcatccatttctgatttaggctgaaaaatacaatcctggtaggtattattcaatagatcatataaggcattaacgtgaatttgacaatagggtttctttttatgagaagaagcttgtacaatgttattcgatttcggattccagatttgattaaagtcagagccatcaatggcaaacaaacggtagtgatgatcaaaaagttgaatattaaatagattttgattaaaaacagtcagaatatgtttaaaacaagcaggagaaagctggcttttgcgttgaacataggcagaagtactaactactttatcgttctttttagttgcatcttcgccaaaagctctaaagagttcactgtttaaattctgaccttgcatgttaattgtagttttaaggactgtcgctgcatctaaagtgcgtttcctggtaaaagcatgaggattattaataaaatcgtgaatatgatccccagtattattgataatttgatcaagacgttctagaatattcttatgaagggctttcataattaacaccatctttctggcaataattttgaaggtttaaaatatataatatataagataggcgaaaaggctggtcttttcgcctttattttatacaaaaaaagagatcgaatccaaatgattcgatctctaaaaaagcacccttaattgtcaatgtcttaacttaatgacattgcataattttgtgtcgctctttttttgcatggtgataattatgacagatgaaaagtatgagcaattaaatttgtttgatatggtcaatgcaatagccgagacacctaaacaggataatattattcccttgagaaatgaggctcacctagaggttctgcatcttaatcgtaagttttattctgctaaggcaaacctgtatggtaaatttaagcaacttgctatggcaatttacagttcttacaaatggactgatgaacagctattagaaagtgcaaaaatcatttatccatatatcggttttcggactaacgctaagaccagtaccaacaaagtaaaagatgtaatttttgtttctgataaaaaacaacaagaactaggtctgtttggtaaaagtgaccaaacatattgcattcctttgtattttagaatgcaagagaatgaatattatagacgcttcttgattttgtcagacgcatcagaactttataaacactatactgatacctactatcgcaagcgtaagccttttgtacgttactcctatatctctaaagcatatttgcttggttatgcttatctgattcaggcaattaagtctgaatttgtacgcactaaagatcagcatttaatggatttttctgagatggagcttaacgacttaattaagggtttaatttctggcgaccgctctactaactatgccttttatgattatgctattactaatgcacaaaccattaaaggctggcaaaaagacgttgctactaatttcacgcttgagcaggatatttatgctaacttaggtgatgataaagcaatcctccagtgggacggctatcgggattttgagcgtttgctagcgttcgttagaagttatcttgacgataaatttaaaattattccgactgcatcactaacgcaggctaaagtccaagctgttttgtaggatcaaaaaaagtcggttctctttttattgagagaatcggctttttctttttgctctgattttgaatcatctattaattttagaaaattttttgttggtaattttttctaaaactaataaagatcattcgattgctcttgcattaactcaatcttacgatcagttcgataggttaggctaatcgatacagcacaaatattaattaagcaaaaagcaaatatttgaaaaaatatacctagacctaaaaataaaaaagtgctttgttcggggctatggacatcacagaaaaaccaaaacatgatttctgaaagtaaatcgcatcctattccagcgtaaaatagaatctcattgaattcacccgaatgtacatcaaagacataacgtttgataaattcttttctgttaggccaatacttttttggcaggtttaatttgataagaagcaacaaaattcctgcttgaattagcactccaatattaatcattgttgcaagatgaaaactaaaaccaagtaagacattaatttttatactcatttttccctccgatttcttttctttcattttagaagtaattaataatcagaagggctttactctattttgggtattttagtttgaaaaagaaggtttaaagtcgctaattaatggccttttctttcggttctttctagtgttttaccagttgaagtgaaaatattgttttgacattcctaaaagagtcgcaatgtcatgatagctttatgctatcttttttctactttttcagtagattgcaaatcaacctttagttttgattaatttggactaataaaaggctaaaatgttttttcattttacaatttaaatacaccacatgtagtgcaaaacaaggagcatggttatgacttatttgaagagagcatcaaaggaaattgaagaaccgattcttcaagaaacacgtaaagtaaatgaacgttatcggttacctacagaaaaagatttaaaagtttatttaattctgcaagatgatggaagcatctatttgactgatacaggtcaagtaggaatgactctgctttcagatcatgagttattgcatagaatcacttcgggagaaatcttttctgtgaatggtgacattgaatgaggatttttcctactttatagacaaccaatcgtattttttactattaacttagaataatttatgtagcaaaaatgcaaatcagattagtcattaattcttctgacagtttaaaaggcttatagagagccatgattcaactttctcctggatgtaaaaggagaaaaaaattgtggcttttcttttgcatttgaactacgaattatttttaaagaaaggggtaagggttatgtcaagtattgcaaaaacttctttcagaacgtttattgctgaacacgtgaccgccattagattttggattggccttctttctgcctactttggcactaagttgactagcgtagttgcttttgcacaatacgatccaagctcaagaacttctggcgactctgcaggtgctaaaacatttgccgatattttcttcggtttcttaggaccattgcaagactttgcaaccgttgttcttatcttgtcagcggtcgtatgtgggatgaagatcggggcatcaggtatggttggtgatagccgtacaagaacaaatgctatcgttggtctgtttttcatcattgttggtgaagttgttgtccttcacgctcaagccttagtcgcaatggctactggtatttctgtcaacggtcaacaataaacagcttaagcaattaagcaaattgtcctagtaaccgcagggagggagtgttttacacaatgggtggtagcagacaagttttaatcgtaaatttatctggcgcacagaaaaaggtattagggtttgcgagctggcttcaagtcggtattacagcaagtggaattattttaggaagcgtcatttatacaatcttaaataatatcttgctttcaatcggtactggtgttggagcttcaatcgtaattgctggtatggcatttgtagctgtactcgttccatttggcattgtagcttttaaacccattcgtgataaacagggagacctgctttattacgagagtacccagttaatgattaattatcgttttctaagacgtgaggttggaacttacattaatattcagccaaatcggcatcctgtaaatgcaagattgccttatgtaaaaaagagacgaattgattagtaatttaatagaaaggagatattaatatgccacgtaaaaataataatattaaaagacttaacactaaacgaagtgtagggaataagtctggtttgactctgattcttacttttgttgtctggctagtttttttcttagacatgatgttcgtagctcataatgatccaattattatcattgtcgtttctgctggcatctgggtcttcgggcttatcttgatgaagcctggtaaatttgccatgagtgttcaacaaaatggattttggaagactttgtttggtaacggcactaacgaagggcaaagaagaagaagacgttagaagtacgctaaattgagcagtcaacccatccaacactaggtaggttgactgtttgctttaacgctaattctaaaagaggtgtctaaaattttagtatttatatctattgttgccgtagttttagctcttactattgggggctacattatgtggcgacactcgcaaaaaaagaattttgatttaactccaagagatcgttcaggagatgaattagatgatgatgaagatgaggatccatctgaaacccctgagtacgaagacgatgtaacctttgatgattggaataattgggaagatttattgcaggaagcaggtattgttgacattcgggatggcatgattgagtacgaaacaggaaataactcacgaatgtttattgccttagccgaaatgcaacagtctaatccatttttgaaaactgatgatgaactggcacagcaaaatgctattcaagaagtctttttcaatggtttaaaaaatcctttgaaagaaacatctcaaagccagcgagtggaaatgaccgactttttaaatcgtttaaaggataactcacagagaattattgggtctaatccgcagatgaagcaatatgctcaagaagttattgaagacactttgaggtatcaaagacaaactgatcgttttgaaaatagagcttatttgcaatttatggcgattattaatccagatgaagtttacggggacactcctgctgttatagaacaacagatacatgaaaaagcggccgaaaaactgattcgtcagattgatcgtggtaatggtttgctaaagcgtgctgaccatgctttagctcagcttgatacttttggtttattggaagttatttataagacgtttaatcgtgacagttcagttagggtgcggttagaggacgttgttcgtcagcagaaatttcaaatcttctctagtgcctttcaatctgataagtactttaaagatgttcaacaacgtattcatattgaaaccgaagcaattaatcgggcaagagatattctgcttgctcaacaaaagaagcataacgaagctatgctttctcaaggcaaggattattacgaagatagctatgatgaagataatagctcttcaatttccacaaatgtaaatgagtatgataattccgctgatactgacgatgatgatatttttaacccagatgatttcaaagatttaagttaagaggtgttttaaatgagtttagcttcattgtttaagaaaaaacgtgaggaacaagatcttccagatgatgaacaatatacggatgaagaccagcaagactatgattcagacgatgaagggtttgaacaagcccctgaagaggatggatatattgatctatcacaaaatcctgcgggtactggcaagtctcctgatgaagaagacgatcaagatccagaagatgaatactatgacaatcgggatgcaccaacaactgttctaggtcaaccatctttgctaaatgttattggtccaagctattggtcaacagatgatcttatgcaagatgagtttattatgcgtgaaaatatgaagtctaagacatatggcatagcggcttatgttcccccaagtggatatcctcgtatgcttgatactcaagtctttcaagagcttttagcgcaaggaaatattgatttaacccttgatattgtccctcggacacgtagagatactatgcatgatttgtctaacatgttaaacgtaattcgtgccaatgctgaatatcaaaatgaaaagggtcaaagcttccagttacgtgaaaacattgctaaatacaacgatattgataacttgcttgacgaaattcagtttgatgaaaaccgtctttatgatgttgcgattagcatgattgtttggggaacaagcgaccgtgatgtcaataaaaactttggtgttgcgtcagacttattagccaacgaaggtatttctgtaactccttatgccaaaagacaaaaatcaggctttcttaccacgctaccgctaggtgcccgaattagttatttagatgatacctaccgtaacgtagaccgtaaatctttagcggtcatggatattgcccgtaatgcgagtggcagattcaatggtggtattccctttggaaataaccaagctacaccatcacaaaacaccgaattcttgaatatctttggtactgaaacccaccgcccggtaaattacaacatgggaattgtaagtgaatctggtggtggtaagtcagcagccaacaagattaagattgctagggaagttgctattttaggatttgaacatcgctctattgatcccgatggtgaatatgttctgttagctaagaaattagggcagttgaacctaacgattaccgctaatgcaaaatttgtaattaatccatgtgccttgtcattatttgaaacacctcttgaagaagaaacaatgaccgactcaacagggcatcaattatctcctgctgaaatggaagaacaaattcgtttaaatgatgatgaccatcgtcaagtggttacccataaggatggtactaagtatgttcaccaagtaaacatttctcaaaccacttcaaatatcgaaggttttgtcaacgttatccttaccagtaacggtgacgaacgcaagatgaacgtaggtgagaagaacttacttgataatgcgattgattctgtaattgatgatttacaaattaccgaagatcctaactcactttatcttgataaagcaggaatggttaacgacgtttatcaagatcatcttccaaagcctgaacctacattaagtgatatttatcaaaagcttgtcttacaaaacacagaagaagatggtcagccaagtgctaaagtttcaagactgcttgacgctttaaagctttacctaagagatggtaaacgtccaatctttgatggtcagactttctttggacgtgggcgtagtccattgttaaatgactataaatacgtaaactttaatatttcacagcttgagggttcaattaagcgtgtagcttactatgtattaacacagtatctttgggaacgctggatgaaaaatcctgctaaagcaatgactaagaaagtccttgacgcagacgaaattcttcaatttattgacgatcctgaaatgtcagccttctttgaagttattgttagacgtgatcgtaaacgtaatggctctattacttggattacgcaggatattgaaagatttcagggcaaccctaaagctaaagctttagtaactaactctgagtttatgtttgttttagccaccaagccagaacaccgacaattaatgaaagaaacggttgatttaaccgatggggctttagatattttgactggtaaccccgatccaggtgaaggaattctccgtgaagaaggagaaagcatctggattagaactaatccaagtcaaaaagaaatggacttcgtggaatctaaccgtgccgttggtcaagctcgaaagaatagaaatgctatcgaagcgatcaacaaagcaatcgaagggtagtgatgaattgtgcatagaatactagaatggctccaaaatgtaaattggggcaaattcttcaaaagattaatcatcagtttaaccgtggcagttgccctttgcggtattggaattgaagttaaaggattaaccgtacttgctgacacatctagggttcatcttaatattaccgataaacatggtaatttagactggtcgcataaaacgcttaatattcttaaagctggttgggatcaaggtcttgattgggttaaaggaaactttaagcaattcggtaatcattattctactggtggttatgccaacaatgctcaaacagctaaatcttggttaaagcaaaaaggtaaactctctaaagagcaaatacatggtagtcctagcgatggtaataccagtttggaaactgaggggttgtacggttatgcgaaaaaattaggaattgaccctaaagcatatagtagcaataaatcactccttaaagcagtttctggtattttaaacaaaagggcaagtcatgaagacaaagttggtagtagagaaaaagacggttactacgtagggaatattggtaaacaaacagcaggcgagaaaaaagcttggaatactttgacagatggtctgcttcaagcgcgtaaagatctaacaccgtctgctgagaaaaaggttaatgcctacttgaaaaaacacggtggagaaaaggaaactactaagtggtataaggctctgcagacagcgatggataaatacgcaactggtaaagccaaaaaagaattgaataaatctgagaaaacttcaaagaaacaatatgaagattctgccaatggtccaaagaaggcatccgctgatgatgtaaagaaaatgttagaaaaaggtgaaatgcctgaacctactaccctttggggtaaaattgggaaagccttaatgaatgctttttggtcaagtacgattggaagttggcttgaacagaatggtgcaggagctactatctttgcaggtgaaacaagcgctcctcaactagctagtgatgttgaaagcaatccatatactttgatttatccgatttcatctgattacagtacaatgagacaagtatctgattggcttcaaccatcaatgattgctttaggtggggctttaatcactcttgccttggttgtatcttcgatgaaaatgggatggggtcaagcctttgatccagttcgttcaaggctggcttggtatcaaaatattattgatacgatgattgccgtaatcggagtagctgcatttcctgcctttgtcaacatgattctccaattggatggtgaattgctgatgggctttgctaactttatgagcggcatagcccacgatggtaacggtacttctgtttttgatacagctattaaattaggttttgataaatcaactattaatgctatttcatcaggtatgttgcttggtggatcagatttctctggtgttgtttttgagattatctatttagtttcatacgtaggacttgcggtctatattaaatacttctactttgtaagagcaattacttttactgttttaattggtattggacctgtatttgtatctttatggtcatttaattggggtaaaagccgtacttttgcttggcttaaggactttttggggactgtatttattcaaattattcatgctcttacaatcacttttatggcactcttcatgcagtggaacaatgggcgtttgactgatggagcggcctcaagtatcgctcaagcaatcaactggcaaaaagaaaatccaggcaaacaatttttaaatactattacgttagggctagccaaccaacatggtagtggtactccatctaatatttcagtttttggcgttttagtagtaggattcattatcatgatcctgttccgcccattatctaaatcattagcagagctgtttggaattagcactaatatgctagataatattaatcattctacttcaaatgtcatgaaagcaggagcggctttaagtttgcctttagctttagctcctgctagagctggtttgtctactgcaaaaaatatcggtggtgcttttaaggatggtgtcaaaggtgcttctaaaggctctaagaatttcaaagactttagaaacaagcttggcaaaaatgtccgtcaaggttttcaaaggcgtaagcctgttcgatctggaattgcgaagatgaatggtgtcgttggaccaagcgcaggcgcattaattggtatggcggcaggtgcaggtgctggcgatccgcaaacaatgttggcattaagtgcttctggtggtgcaatcggcgaaagagcggctcgattagtcaataagccattatctacacttgggttaggtcagcttagaagagtaggtaaaacttttactaataaaccaaatttaaaagatactaataataaagtcaaaaatgctaataaaaagactaacggctccttagcagatcaaaataaagctgttcgtgacgcagaaaacggccgtacggctgtcgaccaaaaccttgctaatattgaagcaaagaaacaagatgttgagcaagaatttaaagaaggccgtattcctgttggaatgatgaatgacaagcttgcagatctaaataagcaagagcaacatttgaaaggcttgcaaagtgaccaagactttcaagatcgacttgccgttgcagacgctagaaaacaggctcaaggttcatacagtaatgctaccgatttagctaaagccactcaagaagcattaggtgatgaagcagataaggtttcagttggcaaaaatggtcaagccaatgatattcagcagtcattagctgtggcaggtgcttcaactaatggagcagtaatgtcacgttacgatggcaacgcaattgaaaaagcttcacagcaagctaaagctaaatatgccgaacttaatgcaggcaaattcgctgaaaatggtttttctgataagcagtcgtggatggattctagtcgttatcgtcaaggtgaagctaaagcaatggagctggctcgtaaagacgcagttattaattccgataacaaagtctttagtatgcccgatcaaactgataattcagcctttggtagcagtatggtaaatcgtgattcttacaagaacgagttatcacgtagaatgtctcaagcaggcgtatctaaagaagctcaaacaagagtcttgaatgcgattgatggtgtttcggggcaggccttagttactgaaactccaattacaggttcagatactccactacagactttgaattatggtttgaacaacaagcttgcaggtcagcgtgcatttacactgaacaacattggaaatcctgacccaactgctggtcaagtatctgcttatgatttagcacaagtatatcaaggtgataacagcatcgatgcaatgaatggtaatggtaatggcacagcctttactgctgatggtttccaaagctatctaaaaaatgctaaccatgccaatagaatgcaaaatattcaatctaatttggcggatgcttatgcagattaccaaaacacactatctgctactaaccaggcttttgaccaagcatcggctaatgccgtaggttttggtattccaaatcggcttttaggcatcagcaatttgggtagaaatgatagttttagtggtggtattcctggtggtgtaaatccttatgattacgttgcttcacaacgaattgccgactttaatagttcatttgggccatctgggatgaatccaggagacgctattcaagaattacgtgagaatgcttcatctgccagtggtagagaaggttctggtattgctccaggagacttgcgtttagttactggcaacactggttcacatattgaagctaaattagcagacggggattatcacttaattggtaattatggcggtggtgaccctagtctatctggagatcaacaaattattcagaacttagacgtaggtgcagatggtaccattggaccacgatatgatccaaatacacaccgtgtcgaaactccttatagtttattaggggatgtaagagtacctcgtgcttactctaatggaggacctaacttggatgatatgcttggcggttatagtagttctggtagcctagctaaatctgatgttactgacttcaatactatgccaccaagttatcaattagctcgtgcagaagcaaacggtcatccagtaactcttgataagttaaacaatgattactcagattacagatactactcagatggtagtcaagcagttattgttgggaaagataaagactctggtcaatttgaacaagttactgcaccattccaagatactatgcttgatacacatatgtctggtcagcaatactgtattcctctaactgatactggtaacggacttattcctgattcaacacaagaacctgatgttttttcaaagaataatgtcatttcacaacaggctagaaaagaaatcttggattctttgagattgcacatggataatagtgaaagtcgattagaattcaataattatcttaacgatcatttagcaccaacagagattaatcctcataactttattggaaatcactctgctaaccaagatttcacgcttcttgatttatctcactaaagagatggtttttatgaaaaagatacgtttatatcgtcaagatactaaattttccgttattttagcttggattaatcgacttgttacactttcttgttggattgctattgtcattgatattatttacttctctaaatctgttaatttagggatggcactagtttatggcatgtatacacccttaagatattttctttttgatatttcccctgagaagatacaaaagcgtcctccctcgcttgatagatctattcccttgactatctttgttagatatttagggaaagtttttccaattccacaaggcaatattttagcgactatcactggctttctacttgcttgtgctagagctatggttaatggctatggattgttgttctttgatacttttacctttatttatcaagttagggacaatacgacagataacccgttgacaccaagtgatgaagatagtagcagtaaattcaaaaaactagaaaagcaattgcttaaatcaaacaataaggggcaagaagaacgtttagatgagcttaaagaggaatggaaacaaacagaagttactaatagcttgaatgtttgggccttcccgctaagacggtatttgaaacgtccgacttactattttgacaatcatgaagttggtaatatttccattgatgatcagtatattttggaacccaaggaggataacgcaaagcaaaagcagagtaaaaactcttctactaaagagcaaaaagaagggatcgttaaactaaaaaagttattatagaaaaggcaacataccttgaataaaggtatgttgcctttttctatatctcttgggttgcaattagataggaagagtcatctacgtctttgaatttgatatggtcaacatgatttgtagcaaagacatgtcgaatagctttcataaagtcagaattgagtctaagatttttctggtaaacggagagtggtctctttttgtctatctttttgcttgttgtcaatacacggtagtatggaatatcaaagatacaatcatgctccttgcctaacttgctctttaacattaagcgatattcaaaatataaatctttttcgatgatttccatttgattggttaggacaggaagctcatcggcatcattaagatgttgttgatagaacgtattaatgatgtaagcataattttccaaaaattcttcagtaggatcatattccgttcctatttcatatttctttatcataattaaaaatctctctaaacatacttataactatattttgactttaaaactaaaataaaactagttgctcatatttcagttttaactaaatatgttacttattataaaagcaaattacttttgaaaccagtatttttagctattttaactattttttttttttttgtatatttttaagtgctttaactatattactaattgatactttttttttaagacacctttcctgaaactgtcaaatcttttgtgtaaatagttctttctcgtaaattgattttttaattatttatttaatcaaagtaggattctaaggtgtcctgaacctgaccaaagcctttatgaattcgattgaaataacggtcattgtagctcattgcctgaataccaataaaagcatcaagcgactgttcagttggaaactctgccttaggcttagctttgcgcttgatcacattgttaaatgattcaatcatgttagtcgaataaattgaagctctgatctgcttgggatagttataaaagaccagcagatctggttctatgtctttcaagcttctgataacatggctgtaaaccttgccccatttggtatagaagtcatgcaggacagctgtggcttcttctttgtttgtctgttgatgcacctgtttgaattcgttcatgatcttttcacgatcgtcgacgcgtactttagcgcagatattgcgcatgacatgaaccaaacagcgttgaaaatgagctttaggataagtcctggccaaggctgttttcatgccaacaacaccatcagaaagaaagagttcaacttgcttcaagcctctggacttcatgttttgaagcatctctgtccagacttcaatgttctcactaggagcaatgcagtagtcaatgacttccttatgtccattaggtttaatgccaatggcaatatatactgcttcacgctcaaacgtttctcggcgcaaaggaaggtatgtcgcatccaaatagacgcagaaaaacttgtcgcttagcttgcgtttgtggtaagcctcaacctttggaatcatctgcttggaaatatttgatacctgagctggactgtaatggctgctatacatcttttcaattagatcggctatttccctggtggtcacgcccttggaataaagcttgataatcatgctttccaagacatccgagtgctgcttgtagtcaggcagcgtgtgctgatgaaattgaccgttgcgatcccgaggcacttgcacttcaattgggccaaattgcgtatcaactttgcggaaataagcaccatttctagagttgccagtattccagccatttctggcatagggatcatagcccagaaaggcagtcaattcagcttctagcaagttattaacagcctgttgtagctctttgcgcaataaatcatttattttgtctggattgaatagagcttgagcaaaatctttggtaaaatcattcatgaaggagttcttctttctgtatgtgttttttttgttcaaaccaatcatacgagaaaggaactcctttttctaatgtttaaagaaataaatttaaggaatcattcatccttacacaaactattttacagtctcagaaaacaagctttggatttttaaacataagcaaggtgattccgtatatttatataacaaaataattggcagggaaacgatagctaattactatgttgctaaaattagcaatgcaaataggtatattactcttgcactaaggattctcaatgtagcaggctatgatgccagacgaccatacatctttcatcgttggagcaagataattgttaggttgcctgagaaaggaaaaatagaaaatgtttaatttaacggttaattccgacttatcttctgcaggggaatttgaaaatacaatcctagttatattcttaggtataatgcttctttatttctttatctcagggattgtagtaacagtttcaaacaaaaaaattggtccgagaatgctacaagcaggtgtaataatcgtgtttggcggaatgctactagattttattgttatgaaccgaaaacaaactagtgcgctagatgactataacgttttagaaagttctttactacttgataaagttaataatgcaacaattgatgtcgaattaactagtgaccacaaatttattgttgagcaaaatgaaattaaaaatttaacaagtccagtacatggcaaaaaagtagtaacaactccagtaactactacaggtaaggcatatttgagagttgtcgattacattaaggataagcgaaagaaagagcctacagtaaatataaaaattactcctggtataagtaataccgtggcttcatatgagacaccaaagggcaaatttagggttatctgttatgctgataatcagagcaagcataaggataagaaatctactacagttctcaaatactagaaggtatgaggaaaaggtggcgaatatattgaggggagggatgcgaggaaaacttagaaaatcgtaaacattgtaaaagggctaatctaaatcagatagaaaggatagacccttaagtaatattaactttgcttttactgaaaataatagcagaaacccgtgattttaatcacggtgtagttcattttaagggaatttagcctacctaagctgattccctttcattaatttcttaaaaggacaacattatgcgagactacgaaaaagaatttaaagataaaattgcaaatttagttaaaataaaagaagaaaatggtaataaccaaggagctaaacttagctacaatgacctcattgtgcctaaatttgttacaatcattcaaaaatatgaaatgcgagctaacagacatgaacatcatattggtttaatcgtctctttgcttccagaatgggcgattagcttcaatcagatagaaaagcctgcacctggtatgaaaacaactgtcacgcttgaagaagaacaggagcaattcgacagctattatcaacaacatcctgataagacaaaacctgtagatatgtggaaagcacccttagctattcgttatgagtattttgataatgtatacaaccttaatactggaactatgaaagcaggacataagtttttaacttatcaagaagcggtagagatatttaccaaggatgaaaagtttcaagaatcagttaaagaccatgccgttgtagtaggtaagtactgtttgcaatatgtttacttgcaaaagcaagaagataaaactaaggcgcatccctactgggtctatcctaaacactataaagcaatcattgacaaagctacctatgataaattgaaaaaacatcaagcctttgtttgcaaaaccaaattacccaacagcgataataacgtagaaaagaccgctattaatttgtttgttaaacctgctactagatatgatgtggaacattttaaagaacttgacctagttaaaactacagaattagataaggatcagaaactagcagttaataattttaaatatcgggaatatattcaacgtaaacagaaatagcaagctaaagaaaaataaatgaagcgaagcgacgcggagcaatctgtgccgcttattttttccttttagaatcattttttcttgaatgaaagcgtaagtcagactgttcgcaaaaaaattctaagattattaaagaaagctaagtgtaaggctttgctgcacaaaagcctcacatatagagtataatagagtgtatcaggaggtaataaacatgactagaattcaagcaaatgtgaacaaagatgttgttgaccgtgttaattacatattaaaatctgttggtcaaacacctacaagtgtaattaattctctatatcatgctattgataacacgggagctattccttttaagatgggattaactctcgaacagcgcaactcattagaaattcaaagattagctctgaaacaaaagcctcaagtgattaaaaatgctaaagagtttgaagaaatctggcaggatgaagatgaagattaacgatgtttacacggcttatgtagcttggaataatggtggtaaaaatcgaccaattcttatattaaaagaagatgcagacaacgtttatttttatcgtattacaacaaagtataagaataagtcacgtgctatgaaagctattcgctatccaatagttgattggcaaaaagtaggtttgaataggaaatcttatgttgtaattgatagaccatatcaagtgaaaataagcttagcagagtttaattatgttggtcgattaacagttaatgacatagaaggcttaaagaacttcataactaattatcagaatcgtcaaaaaagtaaaagcaaacagtaattcaattaaagttgctttggaaaaataagaaatttaaagagtacaaaaaacgatcaagattttctttttaagaatcttgatcgtttttaatcatctggaaaggagttttctttcagatatatgatataattacatttaatattgaagtaattacttcaatagctaatgaacttagtgcaaaggtgctaggattcttgtattatcaagaatttggcacctttttttgatttaaaacgtttaagttattcatagttttagcggcaactacttgaattattactctaaagctatgacatacatctaagataatacgcaaggttgatgaagagatataaagaaatgacaaacatctaagattgtaatctactcaagaattatgtagtcggaggttcctaccataaaggaatgacatacatctaagatccgccgcttgatgcctttggtaaatatttcggttcctaccataaaggaatgacatacatctaagataggtattctttaatacttatcttagaatatatccagaaaccaattgctatcagaccttaaatgataattagattataacataactgttcgtaggatcgattttcaaaaaatacattttattatttctttgctttaaatggatatttcattgactgggggacaggggaaaatcattccggaaatcatttcatagcaaacatatgctaaattagacaaatcataatagttaagcttaatttctagttgagctagttccttatgtttttttaatcttttagataaattgaataagtaatctttcaataaggagttatattgttccttagaacataaggaatcccgccaagtaatatgatttagcaagctgtcaaccctgctagctactctataagctataagcttattggacaaatcactgtatgaattcaaaagataaatatttgataatactgcagaatttttaagcatatacagtttttctttggctaaagaaggattgcccaaagtcaatgcaagttcttttagcgtacacggttgttgggtctgatcctgaagaagttgaatcatagcagcataagctggaattctttctactattaaattagcataaaaagtattttttaccgcatttatctttacaggagagcctgtaatgcagggaatccaaaagaggctaggatcgttacatgtaacacgatattgtgctttaacatgtttagaatctactatcatttcgaccattttagtttggcctactctagcgtataagcggtcgccaaaaagaccattaactatctcagggatcttgtagtaacggaataaattattttcgctgctttgaaccattttacgtacctgtctttctaattatttaccttaattttattatgaaaatacgcgtggtgctagttaaatcgttctagacaataagccaaattataagctaaaattacaatttccaaccggctttgaaagcctatcagactacgtgctcgattgttctcggcattgtaataggtcagaagcgaaaagtcgctttcaattgttctgcgaatagccatcaattgatgatcattgtgctttttagctcctgtcatatttttacgatatggtgtccaaagttcataacccatttgttttagctgttgatgcagttctttgcctaaatagccttcgtcgccaagaagatagtaattagatggatgggcattttccagcagttcaactgtctccttggcatcatgaactgatgcttttgttacgacataatcaagaatgtaaccgtcatcgctaacaatggcatgaactttgaaaccatagaagtaaattttcttggtggccttataaccaatgttggcataaccgcgaaaaattttagcacgatagttgcgaattggttggcaaacaggtaccggaaagctgtcaatgatcaagaaatgtccattcaggtcaacctttttattcatttcttgccgtatctgataaatcaattgcaatagctgacgtgaacgccgattaaaacgtgagtgtgataaacaattgaaacattcacagaatcttctttgtgattcaattcctgtcttagcttgccagataagtaaagccaaaatcagactgtccgtagttttaatttgatcaatatttcgccgatgagtaaactcagccggtgcatacaaacgataccagtgccgacaaattatcactaaatctttaaaactaacttgtaaatggtggctaaaacgcttaagcttaaggcagttcaatcagatcaggctcttttctattattatacaagttgagtctaacaagattggacttttttattaactaaaacgatttaactagcaccacgcgtatgaaaataattactttcagaaaaatttagaagagcagaaaatcacaaacgtggaaatttctgcacatactaatgaaataaaagcagcatccctaagaaaatttatctctttaggacgctgttttcggctaacaatagtattacagtcattgtacagtcattgagggctagtactataaggaaatatcatacatctaagattcacttcccaactatatggttgatattattgattactaccgtaaagaaaagtcaaacatctaagatatattatccttttggtggaaatggttcattgattactacagtaaagaactaacatacatctaagatacggctattgggttaatcaatggattaaggagttattaccacagtgaaatgacatatatctaagatatgtaatctaaattatttttggctattactacaaagaaatgacatacatctaagattctcttagtatttttactccaagatcaaaagcatttaaggatcagataaggcttgatgaattagcaagatggatcattacttatcattcgtactccacagtctccgaaaagaatttggtcgctcttgatggtaagaaaacaaagttccaaaaatcagcaggctggttatatcgtcttagtccttgctttgtaacaggaaagaatctgttcgaaacattaatgctaaacacggtattagtaggggataaaggtgccgagcctcaaaagccatactgggaatataatcagcaagattatatcgaacatcgtctgcagatgaaacaaccgaaaaatacagcagaagcctatacagtttggtcaagaatgctacacattgacttggacgcatacggcaagcctattctttatagtgcaagtttcccacaactagaaactaaagaagcttatagcgaacagatgactacttggcggtttaatcaaaagcaaggtgggatgacacctgaccttaaacgtgaagccaatattgaagaaccgatgtggttagattggaatgaatttacagatgaaaatactgataacacgcatgctttaggaataatggaatggctaaagcttatttatcagcaagattggattagcaaaaatgccacagtaaatttaactacaattaatttaattgataatggtaatgtaacctccaagttaccgataagagaactatatggccgtatatcgcctaagttgtggatgctatcagatgagagctggtttaagacaattggcttaatagttgatgctacagctaaggtagctggatcagcgtggaaacttgctcaagaagtaagcaatcttaaagggctacaagcacaaagtaatgctattgcacaaaaaacaaaaaacaaattttggcgagaccttgctgattcgatgattagttttgacgactggctagaagaaatagagtatagtgacgatagagtagaggtagcacgaaattggtttaatattacagctaagacctatgatagtataagagcagagatttgtagcgatccatctccaagagaaatcaaaggagataatgaccagaacatatttacaataaataatcattatagaggtagcgtacaaagaacaatagttaatgctctgactgaaattaaaaagatttcctaaaaattatccaatttaaaatttgaagtagcatccctttagtagttatcgaaatgggatgcctttttgtgtgattgatataaaactgaaaaatagcgaatggaacgtaagaaaaacccacaaatgcaggtaacaacatttgtgggtttattactttgccgtagcaaaaatccaataggatttaagcttctaatatttcatcaataattgttttacatcgatcaatacagctgtttgttcctattgcataaaagttacttttttgatgaaataatgccgtccacgatatgtctctttcgtcaccaaaatatcgtcttgtgcattaggactagagttgattgacgtaatcctattcagactcataagtgtctcctttcctaatcttctaccttagaaaactcgccgttggctaaagccttatttacttcttctttagtcattgctgtaactaacgcatttccatcagaatcttgtgcaattgtattatcatcattcattttataataagcagttaagccctgtgataataaaaatgacggaaaacacatttcagcaatatttttcggtactttttttaaaaacattagaatcgcctcataatcatagcgtttgcaattaaaaggatatatcccagtaaaaccaatacaacagaaaaagtgatattacctaaaaatgcaaaaattagagttagtacaaaagaaagcatccctaaaatagcggtaagccaaaatgacagtacatagaacttgtaatcattcattagctttaacaactttattttcattttgtcacctcatgattttttctaactatcgatattataacaattttcaacatgcctttttggttttgtcaatgtaaattagtaggtattgctgagctttaggttaattcttgaactaggggttacagcattgggagcaaaaacataatcaaaaatttggttgtgagtgggatgctgaatattttgtagttgaactgggttgagataaggcaaattttgaattaatgggagagaatatgctccttttggccaccgttctaaaacggtcctaaacaagtcgagcggaatttcattaagccgtaactgatcgataaatgattgcttattcatttgcaaggatagtttatgcaattctgcatatgacctagtatgactgttgattgcccatttaaggggatgcacaaactcactaccgtagtcgggatgtttcttaagagctgatttatttacagcaccaaactgaaagtaattgtagatgtctcgatcgtattgcaacgtgagccaacgtaattcctgatgaagttgaacgttatttcctaatccgcactgtggttgcaataggacaggaatggttggtctccaagtgggtagccaattataaagttctttatattgattaagcgtgattgccgtgactggacgctcacgagtagggtagacgactaggggcggacactggtcgtctttttgttctgctaaataaatctgctcataagtttgaatgattgtatctaagctatgctcatcacctgcgataacaggctggataaatttagttaaagcgagcttgttatcaaaaattagcttacctaagaacggtgtttttgttctggaacgtgtatattgccaaataccattgccttgtgatcctttaataggctggtcaagatcgttgatcgaagtagacgctaacctaggattattaattaaagttttaaattcctcagaggggataaattggacttcccattgagacacttcattcagttgcttagtgtattgttgaatagagtttaagtaatctaaggtatagttactgccaagaataaattgcgctgtatcaatttgtgcttctgacacgccagtcagtacaatttttaaattagtagcttgcaaatacatctcgtaaagataatgcttttccccattatcatcagctaaaaatgacttcaaaaaccgactgctaaggctacttaatttgcgccctaaattgccatattgtttaaccttattagttggtaaagagccatcagtaatagccataactaacaaaatatcacgttgaggatgatctaatgcatagctaatgtagttaaggattttctgaatttgcgtgttgttggcttcggttcgattatccaattccacaaagatttcttgtctgcgtccgtggcgctcaaaactgatcgtttcatctgctacgaacgtatattgctgatatttatattgatttttaaaactcgatgtatcgaaaagcgttgggtcgaaattccgattgtttattaaattaatatttctgagtagattatcgaaatctgcagaggggtatcgaaatgttaaactcgatcgattgttcgataagctctgggaccaaagttttaaatttagcactccagctcgaaaggcactcgaaaggctttctgatttgtcagggattgaaacctcagcaatgagcgaatcactgtaaaaagcgtaatggaagccaacgtccatatttgtgcaattatgtacattcatgtacatccctgtacggccaccttcataaagtttgctatccctagagggagtatggtccttatcactttgaaattgaccttgctgtgaagaactatcacggtctatgtctttttctgtattattatgtctatctatgtacatccccgtacaaccaccttcataaaactcactatccttagaaggagtaaggcttttatcattttgagattgaccttgctgtgaagaattatcacagtctatgtctttctttgtattattatgtacatctatgtacatccctgtagtgttagtgctattagaaccgctatctttagagagagtaaggctttctttgcttttgataggggctttttgtgaatgcttatcttcatctatgtttatgtctgtattattatgtacatctatgtacatccctgtagtgttaggcttattagtggctttatgcttagagctagtaagactattactattaaaggatggcgtattaattaatggttttagcctaatatgtgatttattggtatcattcttcttttccgcttgggcctgcatccctgataaaagctgatctaatgcttcctgagcttttgtaacattgctacttggctgtttagccttactatcatgtgatttaactgcatccctagtactattagaagatttatcagaatccttaaaatcagagaaatctgattcagaataccaatcagaaataataggtttgctcgaactcttagaaccagaagcattaatcagatcagtcgcaagcccagcgtccttaaaaccgcctttggcaacatcattagctttacgatcatcactattaatggaaacagttatgttagattgaatagcagagttctgcttactgatagtattaccattaccgctgtcattagcagactgtaatgtgttaaaggacttattaccgtatatgggatataagttaattctttgtaaggatgcagaactaatatagccatctaacacagaatcaaatagtgtcttgcttactataggaatattagaagataaaggtaagtctttgtagtcattcaaactctgacagtgtttttttatccaactggtaatagcagaagatgttgccgccactccttttctggttgtcttttctgaatgcattatctggtttgctaaaatctggttgttcttatctgagtgcttatgaacgctgaatgtcccatcagaatgcatttgaatctggatttgcttatctggtttggtgttctggcttaattcaatttggctgtcctgttcgggatgcatatatttaattggcttatctggttgccctaaagacacaaagaaaagagaagaagctatagcaggagtagcaatcccataagacaaagacttaaaggcagatgcataaagactttgtactactacctcaatagcctgctcattatgggaattaacagcaaccaagggatccgtacctagagcaattccttgttgagacaggaaggtacggcaagcttttgttgggatataaatagaacgtggaacagcagaagctgtagtagctttggattttggtcgtttaagaagtaatccagaatactgacaccatttagataaaattgtacgtggaaacagaacaggataaccttgaacaacggaatagagcatagataattgactagaattaacaaagccaagatcacaaatcttatgtaaaagaacaagatcatttgttgttaaagacaatgagcctttaaaacgtttgggactaaaaataaacatataaatacctcctaaactagacatttaaatagtataagagtagcacttaggttttgtaattcgttaaaaactccaaaaacactgaaatcaaagggcttgagggatgcagaaagtcgacaaatatgctcttacttggacataggttttgtaattattttttgtaattcatttagggaggaaaatatggaagatttagaggaaaatcagacaaaaaaaagaagactagctgaggggctatttaaagcaacccattatcgaagctatcattcttatagacgttctctaaaagtaggaaaatcattcttagtgattggtattatctttgcattgacaagtttgattccgattttgctgttacaaacgttagctttgaatattgcagtaatttgtttgacagtttatctattaacagattattgggttgcgtctaaaagccaaatgatgaaaaaagaatccgaacaggtaataaccagcatttttgagtatgctaatttaaatgaaaagataaatggttggaatctttttacgggaatttatggatcagattcattggaactaacatttactaatgaaaaaagctttttaggagatgtcctacgattaattagaggagaagagtcaactttacccctaaatgaaaataatattgaagcgattaagtattttcttgaacgtcaaaatgaacaacaaggatttattgtgtatgcaactatgacagaaatgatggcagagaatttcacgagaagaggaattgtagttaaacaaattgaaaacaaatatcgtagtttgccgagcaggtgggattatgctgttgcaactggcagattagctaatgctttatggggttatccaagagattttggtgcttacattctgcgctatagtaaagaaaagggaaattttgaaaaataaatattaaaaatttccgactttttctgaaatgacaatttgtgattgctaaacttaaaagtgaagatcgaagaaaagaaggagttactactatgattattactttttatacaaaagatggagcttttaccacagataaatttaaaagcaccgaagacgctaaggaatatttggaagaacgaatttatccgattatgattcaagatattcaaagctcaggtcaagacagggcagtgatttatattcctaatgctaatgtctcaattcatgcgataaaggaacatggcaatccacaaaaaaatggacgtaatcttaagcttgtcaaaaaagacaagaatgaaaacaagaaagtgattaagtataatcttgaagatccagagttggagtcaatcatgctagatgataatgatcctaataaacaagatttcaatttaaaaatgttcgaaaaaatgagtgcaacacctcagcaaatgaaacagatggctcaagaaagtaatcggagagaagttcaaaacatggtgtatcgttattttttacgtcacttgtctgtattatacaatgatccagaatggcaagagtttcgactaaaatatgaccaagaaaaaaatggtaaaattttttagtttctaaataatctgcttacatgctataattaacttgtaaatcattattgaaatttttattttttcagacagctttaaaaagttgtaacagcgtcacatttgacgtattaggtggtttatttagttttattgcttccattgaagcagtagtatgtcttaagtaggtcttgatttatcttttgataagtcatgcgtaaaaaatttaaactgataagtaataaaggagcattgaacaatttcaatgttcctttttgatatgaaaaataggattaatgcgagttaattgtcggcatgttgatgagtaagcaaatgtagaaaggagtgattattgataagttagttatcattaataatttgttgttgaagttaataagtaattgaggagagcaatctaagatgattggtctctttttgttttttaagaggtatttaaaatgtttgatttctggaagtatgtagttgatttgttcaccaaccctatttttgatagtggattgatgtccttgtttatttggcgattaactaaggtttttccacgcttcttcaaggaatttttctaaatccgagtgacgtagctaaataaatcatatgagagattaacttaaagttagtctctttttattttaaatgaggtattaaagatgaaagatagaaaaattaaggttgtgcttgttgatgttaaaaaaggtactgctgaaagtaaagtagttgctgactctttggaaacttactacaaacttttagattgtgaagcaatcgacattgctaagcgtacaatcgacggaaaagaacatgattttatcgtggatgataatggtttgtacaacaacaaactggttccttcggttattaatactgacggaaaagtacaattcgttggcaatgtaattatctgtaattgcgatttagaaggaattgagcagagtcttagctctgacgaagtaaaaaatattttaaatcgaacgattgaattgcatatgccacaatctgaacagcaagatgaggtaaatagcaagatggtaatcgttgattaataaatctgttgagaaaaaagaaagatgaaaggaataaaaaatgaagaatattaaattatttgcagtaaatatggaagatgctaatgtagccaagtctcttcaaggagctgaacaatcagtttatgagattgactcagaattgcttgaaagaagaaacgaaagctatacaagaaatggtttagcaagtactactttaattggtaacttagtagacgatcctactgctatgattgatcctttaactaagcataatcaacctaagcccaataatggtgatgttgattatattaatgacaaggattacatctactttgctcatttttgttatgaaacagaagtttattgggatccaaaaactaataaacgtcatgctaataacaattatgttggattgatttttgcaagtcgtggagctaagtatgcaatcagtcattactacaaaggcgatggtttattattgcatggttatcttagaagcattttgagagaaaatccaactgattcaacacgtaatcttaacgtacaatatctcgttgttacagatttctctgctaacccaggtacgcatttaagacgtgcgatcagagataagttttcaaagcaaaacactcccactgttaagacttataacagtccagaagatgtgcttaaagaccgttctttgtcaaaagaacagcaaaacaaattaattgcggaattggttagaagacaatattcaaaagaaagtcgtcctgaacaaactactaatgttgatagaacttctactaatgaagctgttaatgcagtgcagaaacgtgttgataatattgaatcacagagtattcctcaagatgtacctcttccaagtgataatgaagctcctaaaaatgaaacagctgatagcttaaatgaatttgaagtacctgatgatttaagtaatgcctttgatgcagaattttaaatttagttcgattttgttttattcaaaatcgagctttttttttgcctaaaaataagagtttgatttttggttaaatctagcgatcagtacaagatataaggtttgaacttaaaataattttatcaatagaagaatgagaaagtaggtaaaaatattgattactggacgcaagtttgatttagagactattcataaggaagaattggataatcttaacgcttattacgctggtaatgaccctatgttaagcgatagtattgcttactatgcaatcttgtttagacgatttctttgggagaatgctgacaatacatttttacgtaaggatgaaaaagttcagcaaaaaatcattgaaaaagagctggatgagtttcaaggagcaatgcagtattcatttaataagggacaccagacagcgtttttagttttattaattagtaccaaaagcactcaagaatatgacactgaatactttaaaaatccagattcccgaaacaattttttgtacacctttgataaaactatcaattcagatgtatttaccaacaatatcagtcgggatgctaatgatactttgattaattacactaggaataattttgaaaatggttataacgaggtcatgagtttagccagaatcttctttaaaaagggagcttcagttgcttttgaccaagtgaggaaaagtatcgttggtgttgattatcagttgactggatatagtcggatgatgcaagtgccttataaccaagagtttacagttactcctgcttttaaagggaaattttgtattgaaacgcctggttttgaagaatgggatgtattttgggatgcaagttatgatgctaagtttgcaagtaatcttgtagcaaagatcttaattcattcgattactgctaagcaaataaaggaatacgctaagtttaaagcgtctacctatgaaatgcttttaaatcataatttagttgatggatttgctgatgatgatgctctatttgttgtggaaatcaatttcgctctttttaatcctaaagatactgtacgattattagatcaagctgaatatcaagcagtaagggtatctttagcatcaacaattgctcgtaagttaaacgtagacggcaagcatatatttatcaccgattaagttattgcacgtgaaagggggtgcagtaagtgagcaatacagtcttattaggaatggacgatgcaactgctgatatttttaagcaacaattagccaattactctcaaagcctagagatacttgataaaaatgtgccaatatttcataacgcacaaagggcgcttgaaatgctaaaaccaatgcctgacatattgttaatatcaacgaatcatataaggcttgattcgtctgactatcaaaaggaattattgagtggaattgctgatttgaaaatgaacaatacgacaagtagtgtgcgtattgctgtacaggcggatttaccaccctctgatccttttttaagaaaattagctttagtgcaagtaactgatattttttcaggaacggactccaatccatcagctttaagcatggctaaagttgcgaagcaactatcagttccgccaaatttaaaaaatgtttatcagtttgtatcaggtaatgaaccagtagaacaattatcagctattaatgatatgacagaagctatggcaacttcctcggttggcgaaaatgactctagggtcaaacaactagaaaaattagtcaaagtcttaaaggaacaaagggatgatttatccgttaaaagtggtgagcaatatgttccaagagaagattatgacgaaatcctaaagcagttaaaaacaattatggcttctggattaactgatgataaattcaaaaatttgtttcaaaagttgcttgatattgaagataagcaaaaacgtaagattagtaaattaaatcaaattaacgagaagttaaataattcgctagtcgatatgaacagtaggattgaaaatagctcaaatgaatctaggactatagcagaaaacaaaagactgaaaaatgaaatcaaacgtctgaggcaaaagcctgcaatgcaaccacaaaatagagtgatacataagtcagtacaagtaactaatcgtggcgcaccgaagtctcaatcaacatcatatagtcctactctaaataaagcactgcgtatcttaatgatttgggttgctttgatggctgtcatttttggaggtatatatggaattcataaaatccaaaataatcagcagacagcacaagagccttctaagccaaaatattccagtttaattaagagcggcaactatgatgaagccgctaagtattacccaaaaaaagctgttgatgccgaaaatgcaatgatggcggataaagatctttctgctaaagggacaatggctgagcgtatcagcaaatattccgatagtgatgtaatcaagtttgatgttgattattttaaggatgactatcaaggagcagtagatatttataaaaattcacctgatccagaattgactcagcttaccgatgcacggaaggttatggttgcctattctcttatgaaaataggatctattgcagaagctaagaaagtagcgggaactttgaataacgaaaatctcaataagagaattgaaatttattctaagttttacaatgcaaataaaattctaagcaacaagattacaaatggtcatttatccaagagtcaaataaaaaaagcaaaacagcaaataaaagaaaatcaagaagctatggataagctttaagttaaggagtaaaaagtatgaagcctttaaatcgtgaagaagttttacataaagagggaaatggcacaccaagcaataagagtgtcattcataagccatcaaagaaagctaaagaagaaatctttggtggagggaagccaacaatttatggcaagaaaaagtctcctcgtaaagttaagaaagataagaaaaacaagaaaaaagttgctggcttacctttaggggcaaaaattggtgctggtgttgctggtgttgctgtggttggaggtagtgtagccgcacttgtacataatataggggaaactaaaaatgatgtgcaaaatgctaatcgacacagcaaggatactggcttagactttggaacagataaagatgataatgataagtcagatcttgaaagccataaatcatccagaaagaaaaatgatgctaaacataataagcacgaaaaaaaatctaagggtgaagatgcattagacgatttgcttggtggtgatagtaattcatctagtgacgactctagtagtaagtcaagtaaatctaaacactctgacgatagtgatgacacaattgaatcattgattaatggcatgagtggcggtaacagcagtagtgataaaagcttgaaagcattagcagaaaaagcaactaagagtgtaagtcaagccaataagttaggtggcaaagaggccagcaaagctgtcaaaggtaaatctgaaccaagtaagttaccaaatgctaaagaaaatcaagatgaaaagacgaataagaatggcttaacagctttagcttataagccaggtcaaaagcaagacgaccaacttgatgccaaaataaatgatcttgttgctcgtactaatactcagagagaaaataatggtaagggaagagtcaccgaaaatgtaaataatggtggtaataaaggtaatactggtactgcaacagctagaccaaataataatggaaatactggaagttcaaaaccaactaatactggaaaaccaagtaatccattacataataatccaggtgacgtagtggttaagcctgataacccaggacatcagaccaatccagataacccaagtcatgagactaaaccaaataacccaggacatcaaactaacccagataacccaagtcatgagactaaaccaaataacccaggacatcaaactaatccagataatccaggacatcagactaatccagataatccaggacatcaaactaatccagataacccaacaactccaacatatccttatcaatcagtaccagatgggacaagtaagacagtaacatttgtcgatgtcagtggtaagaaaattggcactggtactcttactaagaatggcaataatgtaagtctgagcgacattcctagtgggtataaattagcagacgaagatactgaaggacattcagcccaattattgcaatggcctgatactatcaatgtggtaagtgatggtaccaatcaaccatctaccccgacttacccgtttcaaaatgtggcagatggaactactaaaggagttacatttgtcgatgcagatggcaagcaagttggtactggcacgttgaccaaaaatggtaataatgtaagtgtggatggaattccaggcggatataaactttcagatttggataccgaagggcattcagcccaattattgcaatggcctgatactattagtgtggtaagtgatggtaccagtcaaccgtctaagccagataatccaacttatccagctcaaaatattccagatggtacaagcaaacaagtacagtttgtaacatctgatgggactgttattggtactggcactttaagcaaagctggaaattcggttcagatttcagatattccaggcggatataaactttcagatttagatgctgacggacattcggctcaattactgcaatggcctaatagcattactgtggtaagtgatgaatcatcagtgcaaccaggcggtagtactaattcagatcaaccatccactccaacttatccgttccaaagcgtacccgatggaacaagtaaaacagtagcctttgttgatggaagtggcaatcaagtcggtactggtactcttactaagaatggcaacagtgtacatcttagtggtataccaggtgggtataaattaagcgatgaagattcacaaggtcattctgcgcaactatatcaatggcctaatagtattactgtagttagtgatggatcatcagtgcaaccaagcggcaatactaatccagatcaatcatctaatccaacttatccagctcaaagtattccagatggcacaagcaaacaagtacagtttgtaacatctgacgggactgttgttggtactggtacgttgactaaaagaaatggtggagttgcagttgatggaattccaggtggctatcaaatgactgatttagattcacaaggtcattcaatgcaactttggaattggcccgataagctcactgtcatgtctgtaaattcactagatgtagctaaatatattcatgcttaattagaaataaaaacaagggtgttagcaataaactaacgcctttattttttaagaggaagaggaaatgacaacagtaatacttgctgaaaaacccgaccaagcaagatcctatatgaatggtctcgggttaaagcacacggagaaacaacataaagcaagaggaaagaccttcctagatgatgatacaatcgtagtctcggccgcaggacatttattagagctttgtgaaccagaacactatggtgaagaatacaaagaccgagataatttgaatgcactacccataattccatcgcaatttgattacaatttgccaaaagaaaacgtatttctttataacgaaattaaaaatgcagtagcaaaagcagatagggtaattgtaagtacggatatggataatgaaggtggagctattgcttttaatatcttgcgttttagtggaatgcttaagcaaaagaagattctaagatcttatcccaccgctttaaataaacaggcagtagtacgacaattcaaaaatctaaaaccaatagataaaacatggagagatgcacatgcggcgatagctagatcaagagccgattggatgatcggaatgaacttaagtcgtttgtacacttcaaagttaaaaaacattggtattattggtaattttgctgtaggtagagccatttcaacaacattaaatttaatttgccaatggcagaaatcgattgatgattttgaggtgcaaccgatttatgagttagatggtagtactcttattaatggagcaaatgttgaacttaaatcaactattagagaagtaggacgtgagaacaaagaaaaattcatcgaggaaattaaaaagcatggtttatctaagaaaaaagcttatggtacggttgctttaattgattctaatgtcaaggaaacctatccacctattatgatgactaagggggacttatataaagaaatgaatcgagtggctggatggacacaagctaaatctaaaaaagtcatgcagaaaaattatgatgatggttaccaaacgtatcccagaacagatgcaggagaaattcctctgtacgagtatcaatatcttagagataaatttaatgattttatgcaaataatccatgaagatggtaagtatgaaagatatgacatgccagaaaacaaggcaaagaaatatcttgtcaaagaggggtcagatgatgctcactatggaattgttccaactgaaaagttgatggataatacaagagaagtaactgacgatcagagattaatgtatgaagtagtagtaagacgcgctatgacaatgtttattaagccatatcagtatgtatctaaccgcttaggagtatcggttagcggtatacctatgattgctcaaaataacgcaatgctcagcaagggctggaaagctatcttactaccaaataaaaggaaaaaaagagacacaaaaaaagctcaggatcctcaacaaggtatggattacgctaaatacttaaaaaaaggagatagactagttgtagatttaaagattaatgttgaaaaaactaaaccacctaagccactaaaatctattcaaatttatgataaaggtggaatgatggaacgagcatataaatatgttgaaaatcaaaaatatgcttcaattttgcgtaaaacgaaaggaattggaacttctgccacaagggatcaagccatggcaagtcttgttgctaaaaaatatattgcagtagacactaaggatgttattacggtaacacctaatggttggctaattaactggttattatgtggctcggaagttaatgatccagtacttacagctaaatgggaggaagaatatcaaaggattgataaagggcaaacaagtgcttcaaacttaattaattctacggcacaaatgatttataacgaatttgatcgaattgaaaagacttggaatacgcaaaaaactgttaattattatcaaagtaaagcaggggcttttaataaaaaggtgtctttaggtaaatgccctgtttgtggttctgatgtggtttttcgcaaggatcaaaagaatgcaggcaagtgggataattatgcttgcacaaataaagactgtaagtttattatctggcgacattactctaatcgtttagtaagtgaagcagatgttaaaaaattattggttggtcaaccaacacatgaatttaaaaatttgttaagtaagaagggtacagcttataatgcaaagttgattttaaaaccagatagtgaagcaggtacttataaacttaagccatacattaaaccagaccctgatcgcagatatgatagctaaaaaagcaggatagttgaaaccaatgtcattaagttaagacattgacaattaatattagacttttaaagcactgatttaacatttaattggttaaattggtgcttttttcgtacaacaaataaggcatagcacagattctgcttttttaagctacgcgatataaataatatacagctgatttgggcttaatatttctcttgtccttgcggcctggtctaattggaatggtataatagctgatctgaataaggatccgttcaaaatcttgcgttaaagaagaagccaaatacatgctctgaataatcaagcatgattgcttgaaattgatggcatattgatacttgcaatgcttttgcggaatataggcctgtgcatcaatttgactgattgcattaaacataatcatatgggcataaatttccatttcaataaatttatcttgtttggaatggaactgtacactgcctaaagaatacttcaatttcttgaaggaggtctcaataccccaacgcagatgataaagctctttaattctttttagcggataattttttcgatcaagattggttagcacaacttcccattcttctttgcctgatttggcatcattaattctaaatttgcaggctcgaaattttattgtgcataactcgccaaaatcccagcttagatcctgggtatttttagagcgatacttaatatattggcgataatgatgctggacatggtgaatattctcactggctttatgcgtgatgtagtaatagttagaagtagttaccaggcaggaaatctcacgatcacattcttgatcaggcaatgtcgttatttctttaactccgccttgtccagccttagttcgtattatgtaatgacagttaggcaggcgattgcagttttcaatcatattgaaactagtgtagccacgatccattgttacaatatatggaccacaattcaaagctttaagcatttgaacagccgctttgcgttcatccatttctgatttaggctgaaaaatacaatcctggtaggtattattcaatagatcatataaggcattaacgtgaatttgacaatagggtttctttttatgagaagaagcttgtacaatgttattcgatttcggattccagatttgattaaagtcagagccatcaatggcaaacaaacggtagtgatgatcaaaaagttgaatattaaatagattttgattaaaaacagtcagaatatgtttaaaacaagcaggagaaagctggcttttgcgttgaacataggcagaagtactaactactttatcgttctttttagttgcatcttcgccaaaagctctaaagagttcactgtttaaattctgaccttgcatgttaattgtagttttaaggactgtcgctgcatctaaagtgcgtttcctggtaaaagcatgaggattattaataaaatcgtgaatatgatccccagtattattgataatttgatcaagacgttctagaatattcttatgaagggctttcataattaacaccatctttctggcaataattttgaaggtttaaaatatataatatataagataggcgaaaaggctggtcttttcgcctttattttatacaaaaaaagagatcgaatccaaatgattcgatctctaaaaaagcacccttaattgtcaatgtcttaacttaatgacattgagttgaaactatcttgctttttgctgtgtgtcgggcatggcatttgtctagtctagtgaaagtctagatcacgggtagttgtcgccaagtgtagcgaaccacaagccgttagcggtgacgctatgggtgaaggaagtggctagcgagttttccgagcctacgtacagaaacctggtcaggccaaatggtggatgagactgcagcacaagttaaagtccaaaggacaaccgtaaaaccaagacggtaaaccagggggcagtggaaaattaaagatgaatgtcttaccccgagagatctcgtggacaggtgaaaccgagtaagctttaatatcagcgatcgtaagcctggtcgaaaaaggttaatcgcgagaagtcagctgaggtcgtagtagtgctgaaggttttgtaatgaaactggagcgaagggcctaatgtttgtaagagcatatctcgctataagcaatgttcagacagtccggataagaggatagcctagcacaaagagaacgtaactctttgatggtgaaagcaattgggacaattctgaataaatttacaagtagaaatggagatatcacgagatggaactaattgaacagattttaagtcaaaataatctcaaggaagcaatcaggagagtcaaaatcaataagggagcgcctggtgtagacaggagaacagttgatgagcttgatagctattttaaaaagcatcaagtagaaataaaggacgccatcatgaagatgaagtatcgtccgcaagctgttcgcagagtctacattcctaaagctaatggtaagaaacgtcctttaggaatacccacggttgttgaccgagtaatccagcaggctattgcccaagtattaatgaagatctatgatcctcattttagtgagcatagctatggctttagacctggacgcagtgctcatgacgctattgaacaagtcttggaatatttaaacgaaggctatcaatgggttgttgacctggatattgagaaatactttgacacggtaaatcatgataaattaatttcaataattagagagcaagtaaatgacaaaaccaccctccatttaattcgagcctttcttaaagctggagtaatggaagatggttgggttaagcctaataaactaggtgtaccacaaggcggccctctttcaccaattctatccaatatctatttagataaaatggataaagaattggaacaaagaggcctgcgctttgtccgctatgccgatgactgcaatatctttgtcaaaagcggtaaatcagccaaacgtgtgatgaattcaatttcatcatggctagaaagaaagctattcctaaaggtcaacgcaaccaaaaccaaagttgtacgaccaaccaagagcaactttcttggctttaccttctggaaaagtggcgaatactggcaagcaaagccaggagatgaccgcaaaatcaagctttatgacaagatgagagaacttctctgtcgcagaaaagcagctgctcagcctctatcactagtctttactaagataaatcaagtagttagaggctgggtcaattactttagagttggcgacatgaaatattttctaattaagttcagtcaatggctgcgtcataaagtacgggtggtaatcattaaacaatggaaactaccaaaacgaatatacattaacttaatgcggattaacaaggcactaaagtgcaattttagtgatgaagatattcataaagtagctaatacgcgcttaggttggtataaaagaagtacgggtcatgtcattaactttctgcttagcccaaaagtattgggcataagcaaagcggatcgcccaggcttggtcgatccgctagaatattatttatctcgtaaataatcacaaacgtagcgccggatacggaaccgtacgtccggtgcaatgagaggggcgagttataaaactccctctactctattataagaaattaaattgtaataactaacgcacatcttatagtatgctagccttttgcttgatagcttaagcctagtcattaaatattgatctgttaagttagaatttgaaacataagataagatgtaactttgtcgaagctttgaaatactcaaatctaatgggagtatatctctatctaatctaacagcacgcatgaatgactcattagtagcgatggggccgtctccattttgcttttgaaaaataaagggattgggagttttggtgaaattcaagtttttaacaatgtatgcctttaatccgctattatgaatgtgttcagcaatctcaagccaccgcactttcaataattcttttggtgtgtaaccgagtgaaattaataaaagtaatttgatggtttcgggatgcaatcctaagttaagcatattgggtaaatcattcatccaattaattacgacagtagtcctacgttgatatgatatgccttttaagccaactaggggatatgagtcaatcagatgggcttgtgttaaaaacgtgaagtatttgcgaatgtaagagatatatttattgatcgtgcgagtttttaaatgctcgtgaacatcaagttgtgtaagataatcatttacatctgaaactttaatgtttttaatatcaatatctccaacagcattagcaacatgataattccaaaaattaaataacacggaatttatcatatcaatagataactgattgagtttgtttacatgtgtacaccaaacgtcaaaagatgcttgatacggaaataagtctttttgattcataaaaaatagttgtaaaatccgaaaatatgtttattattaaataataagatgaggggataaaatgtctcaaatagtatgccttacgggtcaaattgcgcaaaaggggaaactttataaatctgaaaaaggaatactttaccttcgtattatactacacgaaagtagtggtaaaagtgttaacgaattccctattgttttttatcgtgaaacagcaaaagacgtggctcaaaattttgctaaagatgatttcgttttggtagaaggaaagattgtatctagtgaaaacagaaaatacgatcgtaccttctacaatttatcaatttttggcaaagaaatatcaaaattaagcgaatctaacgatcagaagggagatgctaaatcagcaccaacgaagcaagttgatgcatcagatctgagagatacaataaaaaacaagattgaagaacagtcttcaaaggaaccaaaagtagtaaagcctagatccgaaacttctgtggctacagaaaatctaggcggagaagtaaaacaatcaaaaagtaaacagatgttcgatgccgatagtcagatggcagagggaacatcagacaatagtggatttgacgaatcgttgtttgatttacctgacgacgacttttgatctttaatggggtagaatatgacagaaactagaacaattggtgaacttgctgacactttaggacttgattatgtgaaattaagaacgccatttaaacggttacaacaaacaaacttgtacctggtaattggtagtgatggaggagcaactcctaagaacaaatatctgagacaaattacaaatattaataaatattttgcaaaggctagtcttgtagatgacgaaatctttaatttcgtaaaagatcaatttgagtattaccaaaatgaaatcacaaatgtagaaagcgtttgtaaaagatcctacttaaacgaagaagatttatcaaaattcataaaaaattttgatcgaaatgaacaaaatgattttattgcaagaaatatgttttcgaaaaatcaatcggatgctttaattagaacaagaattgatgatttgatttcattgtatttgaagaaaaaaatatctgaaactaaagataccactgcggtagtgccatcttttgatgctaagacaaaattaactaaagataaaattataacagtacatttgcttgaaggaattcgtactcggacttggaagcaaggcgtggttgttggattttacttttcaaaaaaagcagggtgcgaattgccaatagtagcgctgtataatcaaaatatcgaattggatgatgcggttaaattagatcctaagtcaagaggaaacttccactttgcaaaacgaaagttaggtaataagcaaccagtagtatggaccataccaatcaacgatctgattgactattcagttacagatcgtcgaaagaaaaaagaagcggaaaagaaaaatgtcgattcgcattatttttattttctcaatatgctcctttctactttaagtaaatatcaaatcggatgcgaatttttaacacacggaaattaccgccatccttttatccaaatcatcacagatcctgttatttttcatctaaatgactttattgtaagcaaagatgatgtaaagaaagtagctgagataaagcttaaaacttttggtaagcctaatgtagaagagttagaaaagacatgtcgacattttactcaaaaattaggaacaaattttagagtggtcaaaaataaaaatgaattgataattcaatctgacttacgtaaagtttgggtcggttggtttgataaggaatctgagcctgtactcaaggggcttcaagagtattcagtaaagagtggcattccaatggacttattggctggaaaaatactacaggatttctattcaatatatattgagccaagcttacatgaggaagcaactacggttgctgaccaatttaaattgtacttcaaggaaaatggggaaaaataggaaatcaattaagaaggaaggccatgtgcttttctttttttatattaaaaaaagtattgaaaatgatacttaaaagtattgaaaataatactaaggcgagtataatgttaagtgtaagagataaggagttgaacatgagagaaatcgaaaaagctagagcaatacttttgtcgagtcatttaacgtttaatcaattacatgaaataactaaaatacctgtaccaacacttaagcgttatagtagacaagctaaagacaaagcatcttttggaaagtatgaaaatattgctaaattagctaaggtatatgacaaatcaaagtttgaagaccaaaaaagacaaatagatcttactaaggctatggaattaggagaatggctaaaaaataatatccctaatgatacatggggtaaaagaattaagaaagctattatgaatgattcagaagttttaataaagatattgcaaacaaatgaaaaataaaaagacacgaaaggaacgaaagaaatggtaaaccaagtagaaaatgaagaaataagagaagatagaagattggatagatggattgttaatttagccgactttttacaggaggaaaagtatcagttacttaaactccaagccttgcaacaagataagcctaaaacagattggaattttagggcaattaacaaaaagataaatgaagcaattgatgaacaactatatcatgtatatcaagtaagctttaataaagatgttttagctaaacatggtttaacacataaaagagaagattttgaagcagtcatgtatattgatcccgcattactaacgatgtttcaaactgtagacgatcattatattgaatgttacactttttagaaaatttagcgatcaacaaataaaaaataaaatgcgtacaatatccttaaatagatgattaagcatatttaaggagaaaatatggaaaagtatttaatgattggtcgtagcgcaatgccaactgtacaggatgcaggtagagaattggtagaaagacttaacaataccaatgaattattaatggtttctaacataatctttatgatggacagtcgtacacatgaaggtagaacatatcgtatacctgcaattacgcaagatgtcaatataacttttgatgggatggattacaaactaacttatgagaaagaacatatggcacttattagtgtatttgtttatatcctagacgtaattagagagtttaataaaaaagcagaaacaaataagaaattggcttttattaatcctaacgatgaaacacttaaagtgttggacgatattcttagtcaaaaccgaatctaaaaaaagagttgtaaggttgatgaaccaatgtcattaagttaagacattgacaattaagggtgcttttttagagatcgaatcatttggattcgatctctttttttgtataaaataaaggcgaaaagaccagccttttcgcctatcttatatattatatattttaaaccttcaaaattattgccagaaagatggtgttaattatgaaagcccttcataagaatattctagaacgtcttgatcaaattatcaataatactggggatcatattcacgattttattaataatcctcatgcttttaccaggaaacgcactttagatgcagcgacagtccttaaaactacaattaacatgcaaggtcagaatttaaacagtgaactctttagagcttttggcgaagatgcaactaaaaagaacgataaagtagttagtacttctgcctatgttcaacgcaaaagccagctttctcctgcttgttttaaacatattctgactgtttttaatcaaaatctatttaatattcaactttttgatcatcactaccgtttgtttgccattgatggctctgactttaatcaaatctggaatccgaaatcgaataacattgtacaagcttcttctcataaaaagaaaccctattgtcaaattcacgttaatgccttatatgatctattgaataatacctaccaggattgtatttttcagcctaaatcagaaatggatgaacgcaaagcggctgttcaaatgcttaaagctttgaattgtggtccatatattgtaacaatggatcgtggctacactagtttcaatatgattgaaaactgcaatcgcctgcctaactgtcattacataatacgaactaaggctggacaaggcggagttaaagaaataacgacattgcctgatcaagaatgtgatcgtgagatttcctgcctggtaactacttctaactattactacatcacgcataaagccagtgagaatattcaccatgtccagcatcattatcgccaatatattaagtatcgctctaaaaatacccaggatctaagctgggattttggcgagttatgcacaataaaatttcgagcctgcaaatttagaattaatgatgccaaatcaggcaaagaagaatgggaagttgtgctaaccaatcttgatcgaaaaaattatccgctaaaaagaattaaagagctttatcatctgcgttggggtattgagacctccttcaagaaattgaagtattctttaggcagtgtacagttccattccaaacaagataaatttattgaaatggaaatttatgcccatatgattatgtttaatgcaatcagtcaaattgatgcacaggcctatattccgcaaaagcattgcaagtatcaatatgccatcaatttcaagcaatcatgcttgattattcagagcatgtatttggcttcttctttaacgcaagattttgaacggatccttattcagatcagctattataccattccaattagaccaggccgcaaggacaagagaaatattaagcccaaatcagctgtatattatttatatcgcgtagcttaaaaaagcagaatctgtgctatgccttatttgttgtacgaaaaaagcaccaatttaaccaattaaatgttaaatcagtgctttaaaagtctaatattaattgtcaatgtcttaacttaatgacattggttgatgaacttacagctcttttttgttggatttatttaaatgcttatctaactactctgccgacaaaagaaggtttgaaataatcagatactgtttcaatatcaacgttctgtcctggttgtggtgcagctacaaatttgccattaccaatgtaaatagctacgtgatagctagcaccgtgagaaccccaaaatagaagatctcctggacgagcggtattgataacatcagacgcagaagcaacatcagttgtatctacattctgttcttgatgaattgtatcacgattaatttgaataccaacttgtcgataaatatattgcgtcaagccagaacaatcgaaaccgttaagcgattctccaccccattgataaggaattcccatattagcatattgaattgctaaattgacaatctgttctgctttggtatcgccaactaaagaagcttgatgaacgttggaattatcttgattctgggtagtggtttgcttgtcattttcttgtggttggtttggatcttgtagattaagttcatctccaatataaatctgagaatcattgaatgacaggttattccacttaagcacgtcttcggtttttaagccgtgttcataggcaatttcagagacggtatcacctgctttaacagtatatgtcttaggtggatcaggaatttctaaatcttgatcttctgatactttagcactggttttaagatgatttgcttttgctagagctttaacagttacatggtgttctttagcaatcgacttcaatgtttgacctttttctactttaactgtatcagcatgagctacggcaggtgctacaacagtagatgctagaccaccaccaataagtgcgaaagctagtcttactgagccacttgacttttgtgtgtattccactaaatttcagtcctttctttatcaatcaaattgttaaacatctttgcaaaaatgtgagattcgcaaattaaattcttcgtaccatccagaatctcgtagatgcgtacgtgcagtagtggcaactgatttttagcaagctcttgctcttcaaaagacattattaaatcagcatttttgaaaagaggaactatttgacttgaagaggatacttgaaagtaatcagcattattatctattgcatacttaagacgggggtttgcaaccttacgatagtttaaagataccgatttggctactaatagtagtacaaatggaaaattatactgatctacatccctgtactcaaaggctttttggttccgcaataaaaatgaataggtgagctttttagaaaagtaaaagcccgtgtaatacgtaagatctttacgtaatgaatcaaggttaacctgattaacatttaatgacttttgctttaaaggatctaaaacaaatgttgatggattatttttgtataagcaatgactaagtttagtctggtcaaatacagaaaagccaggaattagtttcttactatgaacgccataataggtaacttcatttgttttagcattaagcctaccgactaatctaatagggttatgacagtaaaagcaaactgcatagtagttgccattttgcaaatacggataggcagataaatacttacgaatatttttgctgtttagataatgccatttatctaagtggtgaattgtcgtaaaaaatatcataaaatacctacctttccatatccaaaattaattatgagacaaaacgatttaaaagagttgtttgttcaaaaatcagaaaaagggggattttttggaaaatagaaaaaaaaacaaaaaagataggaaaatttataggatatgaatgtcaagaaatgaattaggaggatcaacatgtcaaataccaaacaagatgaattgcaaaatggagtttttgttcttaaaaatgaccttttagattacgctaaaaagattgctaaggacgatgctgacagcacaactagtgtggtagaagtggtttataatgttttgcttcaaattggtaaccaagggaacaatacggaggagacgaaaaagttgcgtaaagcctttcaaggaattcctttagctatgcatacccaagctttgcggagctttattgtaagcttttattatgtaaatcacttagatcaagccttagtaccaagcaatcaagtgattaaaagcgtagtagcagaaatgatggcaaccacagaacatttttctgaaatagatggtcaaattctgtcaccttttgaagcaatttacttaactattgattcctttgtgcaggacaacgtacttaaagatcccaagcgtcatgaacaagcagatgtgttaatcggaaatattaaagcacaacgaagaatcttgaatgactatttaaaagaatatgatgcaaagtatggagcagaattgcgaaaggaagtatctgcggatgattaaactaaaaaaagcttggttaatagttctttcaactacgatagttttaattttagcaggctgttcaattaaaacaccattaacccagaaaaaattaacttctgaatttcagaaaaacactgttagcttaatgaatgtccatggttacgtgactgccaaagaacagcttaaagacaaaaaggctaaaaattttaataaatactataacaaaagtattcaaaaggaagaaaaatctgttcaaaagtctttagatgctttaaaaggtgcgaataactataaaggatactctagtagtgtttatcaatttagtaaaggagtattagcttacattaaagtggcacaaaaagatcagactgataaagctaatcaaaaagccacacaagctaaatatcatgcagttactaaagcggcagtcaaagttggtagcgcaagtgattccccaaaagtaaaagcatatgtaactacgatcgtgggctatgatcatcaaatgaaagctaagctagcacacgacaaaaaagtaaaagcagataaaaagaaaaaagctaatcgtccaattattgcttttagaggtacgggaaagcataaaggagaattggttgactataatggtaaacccatacctaagaaatatttgcaaaagaaaaagaaagcaaagcacactatcagtattaatccagtgttaggtacggctttgctcatggtttcgggcttattaatcattacggtgttcttgcaacctaataaatcagatgataatagttctgcattaatggatgattctaaacgtcctaaaccacgtggatatgaattattgatgtttcgtttaacagaattactaggagccattttagtaattttattaatcgtacttggtactactaaataggagggaatagatgcattacttaactagagtattcaagactttaaaaaaagtcacatgggaaaagataccaatatccctaaaacacatgatttatgtgcttttagtagtaattgggagttcccttgtttattggggtattgacgtgctgattactagtttgataggcaaactgtaaggagacaatatgggattaaaacaaattgtcgagaataacaaatttaaagtgcggaaacttgaaaagattgttaataaaattgaagctttagcagataagtattctgctatgagtgatgaagagcttcaatcacaaacttcaaagtttaaaaaagaattagctaacggaaaaacattagatgatttactggtagaagcttttgcaacaatcagagaagcggataaacgtgtgttaggactttatccttatccagtacagcttttaggcggtattgtcttacatcaaggaaacttggctgaaatgcgtactggtgaaggaaaaactttaactgaaactatgcctgtttacctaaatgctttaactggtaaaggtgtacatgtagttacagttaatgagtatctttcaagacgtgactttgaagaaatgggaccagtatttacctttatggggttgacagttggtcaaaatggtgaagaaatgatcttagaggataagaaagccgcatacaactgcgatattacttattcaactaatgatgcacttgcttttgactatttacgtgacaatatggtcaaatatcctgaagatcaagtacaaagaggtctaaattatgtaattgttgacgaagttgactctattttgattgacgaagcgagaactccattaattatttcaggtagtgacaagagctaccgtgctttatataagcaagccgatgcgattgccaaacggatgaataaaaatgattttacatatgatgctgagactaaaacaatcacacttgaaagatctggaattttaaaagccaatgaagctttcggtggtcaagatgtatatgatgaggattcctttatcttggctcactatttagatgaagccatgaaagctaattacacgatggaaaaagataaggattatatcgttaaagacggtgaagtacttattgtagatactaatactggtcgtgtgatgagtgagagaagattctctgatggcttacatcaagcactagaagctaaagaaggtgttgaaattcatgatgctaataaaacagaagcttctgtaacttaccaaaacttttttagaatgtataagaaattatcaggcatgtcggggaccgcttctactgaaagcgaggaattttatcaaacatttggtatggaagtagtaactgtcccaactaataagccgattgcacgtaaagatttacctgatgtactttatccaacagaaagagctaaattcagagcagtactcaagttgattgagaagatatatcaaactagagagccagttttggtcggaactgcttccgttgagaactcagaattgttatccaagatgttagatcaagctggcatccctcatgcagtgttgaatgctaaaaacaataagaaggaagcagaaattattgctcaagcaggtcaggcaggtgcagttacgattgcaactaacatggcaggacgtggtactgatattaagcttggaccaggagtaagggaattaggcggattatatgttttaggaactgaaaagcacgaatcaaggcgtattgataatcagttacgtggacgtgcaggtcgtcaaggagatcctggtaagacagttttttatatgtctttagaagatgatctaattaagagatttggtggcgagagaattgctaaaaccaaagataaacttgtggctgatggtgaagaatttattccaattaaaaattcacgtctgtttaacagtgctgtacgtcaatcacagaaaaaggttgagggaaacaactttgaccaacgtaaaaacaccttgcgctatgatgatgtaatgaatgaacaaagaattcacttatatagtcgcagacagactattttagactctaaagaggatcttacacctcacttaaaggcaatgcttaatcgtactgttgagcgcacggttgataaatacttcttggataaggaacacaccaattataaaggcttagtgaggtacgtaagagaatatctggatgtcgacttagatccaagccaaacagtgaacgaattgaatactacgattagagattctcgctacaaagaaaatttacaacgtagtattgacaagactaaccacctaggacgtttaaacttagaacaaatcaagagtttaaatcgagatgaattgaaggaatatttatttggagagacccttaaagatcttaaagataaagaggaagcattaattgatcctaatcaattacaagactttgaacgcacaatgatcttaaatgccatagatgccaattggaagaaccatattgatattatggagcaattaagacagtcagttacattacgaggttatggacagtacaatccattagttgagtatcagaacatggctcatgaaatgtataaccaaatgaccaataacattgaaaaagacgtttgtcgattcttcttacatacggagattagagagggagtacgttaaatatgagtatgagttctactaaaaaagaaaacagaaagaatttactaaaaagaattggaattacagttggaatcttattgatttatgacttactaacctacgttacaattccaggtgttgatcctcggcaattatcaaagattaccaataaccctgctttaaccatgatggcaatgttcagtggtggtggttttcaaactttttccttgatgtcgatgggactaagtgcttatatcagctcacaaattattgttcaactgatgcagtcaaatgttatcccgatcttgacggagtggagccaagagggagagattggacgaaaaaagctgactaaactcactcgttggttaactctaattcttggttttgtacaagggatcggaattgtggcaagcattaattccttatcgcaattcggatatgctgttgataacagttggtggacttacctagtaatcggaactttacttacagcaggtacctttcttgctatgtggtttggcgatcaaattacgcagtatggcctaggtaacgggatttcagtaatcattatggcaggtattgttaagcgtctaccagatatggctaagtcattctacttatcagtatcaactagtgcaggagttaaatgggacttagtagttattaccttagttttattggtagtattgactgcaattattatttggtttaaccgctcagagtatcgtttacctgttcaatatactcggactgctaatcgtttaactgataatacagtttccaaggatagttacttaccacttaaattaattgttcctggtgtggtcccagtaatttttgctagttcaattttaactattcctcaaacaattatgatgttcgtccaagcaaaaagtgattcggttgccgcaagaattgttaatgactttttctctctaaattcaccaagtggaactgtattatatggtattttgattgtcctctttacttatatttactcattggtacaggtagagcctaataagctggcagataatctttcaaaacaggatgcctatattcctggtgtatggcctggcgattcaacagcaatcttcgtcaaaaacttaatttatgacttagatttacctggttcagcattcttagccttgatctcagtagtaccattaattgcatcaagtttgatctcaccaagcttggaaatgggattaagtggctctagtttattaattatcgttggtgtactaactgatatgggacgacaaattgaaggcttgaaagttaaagaaggattttcagactttatgagtttaacttacagctttaagtaatcaacttaaactaaaagtatgaataataaatctaaatacatgaaaagggctttgttagtcatagtcattctgctgatggcttatcctttatttgtttttggacggtttaagtattgggaatggacaactactcctgaaatgcttagccagtctaaaacaatgacgatcttctatagagaaaagtgcagacgatgcaggaaggtaatgccatggcttatttttaagcacagtttagataaaaccagagtgaacgtagttaatgctaatcactatcagagatctagcttagaagagataggcgtatacattactcccgcttttagaattgacaatcagagctataacacgattgacgtttcaaaaattgaaagactttggaacagtagtaaatgaataagttactacaacattaaataaaaacaaaaagatgcatcccaatcaaagattgggatgcaagtaaacaaacaaggaagtaaaatctatggcaatttcagttgaaatctctcaaatgaacaacaataaatcaattattggcgtattttacaatggcagaccaacttattgggaagctcatgttgtaccaactaaggaaactgatcctaagacagggaaagagcaagtaagacttaacatcaaggctcaatcattaatcaggttgtggttagataaatatacagatgctacagatagcactacaatggctgatggcttgcatatgcttaaaaagttcttcggtgatgattataattcagcaatgcaaatttctgatatgactaaagacattgcaaaaaagatggcacagagaaaatttgaagaaactaaaagtaaattttctttataaaatggcaaaagtaacgaaagatacgcaataaattgcagataaaagcactatttttaaatagtgcttttattttgaaaaactattaatgataactaagtctggagtttttctgatttggtttctatattttgctatgcttaacatatcaagtttaatgcgtagggatgcacacaaatagaaattagaaggttaaaaaacccggatttaaaattgaagtgcaacactaagtgttaaacaaaaagaccatgaagacctaaacttgaagtgacgaaaaatcaagaaaggaagatcttcatgaccaattcaaattctagcatttctaagcactatcatcaattaaccagcgtacaacgtggacaaattcaagcaatgctggattccggcataacttcccgtactgttatcgctcaagaagttggctgccataagtcgacaatcagtcgcgaaatcaaacgcggaagcgtcctgcaaagagacagcagctatttattgtatgagcactattacgctgatactgcacagatttattatgagaagcgtcgcaaaaactgctatcagcgcaatccattgaagcattatgctgtctttttgagaatgctctccagacgctttaaagctaaatttgatgccaccagcatcgatgagttcgttggtgaattcaaaaggactatgccaggctacccttgtcccagcacaccaaccgtctatcgctatattgatcagggcttgctggacataagcaatattgatctgcctatgaagctcaaaagacgcaggaacaagcgtcatcacagccatggcggtcacgctttgcacaagaagcatcttggcaattccattgaacagcgtcctaaagagattgaagacagaaaagctccgctgcactgggaaggagatctggttaaaggcgtcagacgcaagaatcagcctgctttaatgactttgactgaaagaaccacacgctttgaagtagttatcaagattcctgactatcgggcaagcacatgccaaaggctgcttcaaaaggagattgacagacatcctgcctggtttaaatcaatcacgtttgacaatggctctgagtttgcggatatgaccaagatcaagggctgccagatttactttgctcacccatattctccatgggaaaggggcaccaatgagaactgcaatggtcttttgcgtcaattcttccctaagggcaagagcatgaaagacaagtcaaaagcttatgttcaacaggcaactgatgccattaaccacaaatatcgccgaatcctccaatatcacacagcagaggaactcttcaagcaatatatctcttcataacctaactgttgcacttaatttgacaattcaggaaggttaaaaaatgaaaaaaacaaaagatatttttggagaaattgtaccagaactcaaaaagcaaaaattcaacattgatattgacgaattcttagatttcattgggcattatgattttacttatttaatttctcccagtgaagtccaaggaaaattaaaaataagcattgttgatacttacaaacttttggaatttttagctcaacataaataccttgaaccagtgataccagtgtactgcccgtattgcaatgcatattctggttattactatgatactattggtgaaatacctaataaattgacttgcttatattgtaaacaagagatttctgatccattgcaaactgccgttattttctacaaaattccattaagaaaacaagacataaattactagaaaagaatttgtaatttgatagagacgaggtggtatataagcaccaaataaagtaaaaaaagagctatgctctttagcatagctctttaagattccgatatatcccggaacattacattgaaacttcaaactacttaaatagtaatttgttgctttatcttaaactacaaattagttgaaaaagatcaactaaggttgtatgtcatttctttatgtaataacccataaacagattctattacatagttggataaaatgcaataagtaagaaggaaaaatattatgaaaattaaaaacctgaattgtcaaattaagtgcaacagttaggttatgaagagatatattgcttgaagagttcctctgctgtgtgatattggaggattcggcgatatttgtggttaatggcatcagttgcctgttgaacataagcttttgacttgtctttcatgctcttgcccttagggaagaattgacgcaaaagaccattgcagttctcattggtgcccctttcccatggagaatatgggtgagcaaagtaaatctggcagcccttgatcttggtcatatccgcaaactcagagccattgtcaaacgtgattgatttaaaccaggcaggatgtctgtcaatctccttttgaagcagcctttggcatgtgcttgcccgatagtcaggaatcttgataactacttcaaagcgtgtggttctttcagtcaaagtcattaaagcaggctgattcttgcgtctgacgcctttaaccagatctccttcccagtgcagcggagcttttctgtcttcaacctccttaggacgctgttcaatggaattgccaagatgcttcttgtgcaaagcgtgaccgccatggctgtgatgacgcttgttcctgcgtcttttgagcttcataggcagatcaatattgcttatgtccagcaagccctgatcaatatagcgatagacggttggtgtgctgggacaagggtagcctggcatagtccttttgaattcaccaacgaactcatcgatgctggtggcatcaaatttagctttaaagcgtctggagagcattctcaaaaagacagcataatgcttcaatggattgcgctgatagcagtttttgcgacgcttctcataataaatctgtgcagtatcagcgtaatagtgctcatacaataaatagctgctgtctctttgcaggacgcttccgcgtttgatttcgcgactgattgtcgacttatggcagccaacttcttgagcgataacagtacgggaagttatgccggaatccagcattgcttgaatttgtccacgttgtacgctggttaattgatgatagtgcttagaaatgctagaatttgaattggtcatgaagatcttcctttcttgatttttcgtcacttcaagtttaggtcttcatggtctttttgtttaacacttagtgttgcacttcaattttaaatccgggtgaaaattaaaaactataatttggctttgacaccaagtacaagcgctgtaggacatgttgaagtagatgatgatcttaatattctggaaccagttcatcatcaaaaagctatcggggtagcaaaatttggcgaaggtgaaactgcagaggcaagaagattagctcgaagtgctagacgaaccactaaaagaagagcaaatcgaatcaatcattattttaatgaaattatgaagccagaaattgataaggtggatccgttaatgtttgaccgtatcaagcaagcaggattgtctccacttgacgaacgcaaggagtttagaactgtaatctttgatcgacctaacgttgctagctattatcacaagcaatttccaacaatttggcatttacaaaagtatttgatgattacagacgaaaaagctgatattagactaatttactgggccttacattctttgttaaaacatagaggtcatttctttaatactacgcctatgtcacagttcaagccaggaaagctaaatctcaaggacgacatgttggcattagatgactataatgacctagaaggactaagctttgcagttgctaattcgcctgaaattgaaaaggtcattaaagaccgttcaatgcgtaataaggaaaagattgcagaattaaagaaattaattgtaaatgatgtttctgataaagatttagcaaagcgtaataataagatcgtgagactgtaaaatagtttgtgtaaggatgaatgattccttaaatttatttctttaaacattagaaaaaggagttcctttctcgtatgattggtttgaacaaaaaaacacatacagaaagaagaactccttcatgaatgattttaccaaagattttgctcaagctctattcaatccagacaaaataaatgatttattgcgcaaagaactacaacaggctgttaataacttgctagaagctgaattgactgcctttctgggctatgatccctatgccagaaatggctggaatactggcaactctagaaatggtgcttatttccgcaaagttgatacgcaatttggcccaattgaagtgcaagtgcctcgggatcgcaacggtcaatttcatcagcacacgctgcctgactacaagcagcactcggatatcttggaaagcatgattatcaagctttactccaatggcgtgaccaccagggaaatagccgatctaattgaaaagatgtatggcagccattacagtccagctcaggtatcaaatatttccaagcagatgctccccaaggttgaggcttaccacaaacgcaagctaagcgacaagtttttctgcgtctatttggatgcgacataccttcctttgcgccgagaaacgtttgagcgtgaagcagtctatattgccattggcattaaacctaatggacataaggaagtcattgactactgcattgctcctagtgagaacattgaagtctggacagagatgcttcaaaacatgaagtccagaggcttgaagcaagttgaactctttctttctgatggtgttgttggcatgaaaacagccttggccaggacttatcctaaagctcattttcaacgctgtttggttcatgtcatgcgcaatatctgcgctaaagtacgcgtcgacgatcgtgaaaagatcatgaacgaattcaaacaggtgcatcaacagacaaacaaagaagaagccacagctgtcctgcatgacttctataccaaatggggcaaggtttacagccatgttatcagaagcttgaaagacatagaaccagatctgctggtcttttataactatcccaagcagatcagagcttcaatttattcgactaacatgattgaatcatttaacaatgtgatcaagcgcaaagctaagcctaaggcagagtttccaactgaacagtcgcttgatgcttttattggtattcaggcaatgagctacaatgaccgttatttcaatcgaattcataaaggctttggtcaggttcaggacaccttagaatcctactttgattaaataaataattaaaaaatcaatttacgagaaagaactatttacacaaaagatttgacagtttcaagatcgttactcaaattgttaatgcaatcatgggtaatagtttccacctaaactttatttttgatatagatctggataaattaactagtaaagcatggtcatttaaattagatgatccagaactagatacaaagtttgatgccattagtggtagtatgactgataaccaaattggaatttttgaaactctgcaaaaaatctattctgctatttcactgcttgatattttaaatgggagtagcagcgttgttgatgcaaaaattgcattatatgataagcataagagagatttaaacctttattttaagttcttgaatacattaccagatgaaatggcccagactcttaatgcaggctatacgttatacattggtaaccggggaaaagatctcttatctgctcgtaaattgttaaaagtcaatgtagctaaaaatttctcgcaagatgatttttacaaactcatcaacaaagaactgaagaacattgataaacaaggacttcaaactagatttagtgagaaggtaggtgaattggttgctcagaacaatttcttgcttgttcagcgctcaagcgataacgcttttatcccttatcagttgaatgcaattactttcaataagatcctcgaaaaccagggtaaatactatgacttcttagttaaacctaacccagcaaaaaaggatcgtaagaatgtgccttatgagttgagtcaattaatgcagtttactataccttattacgtaggacctctagttactccagaagagcaagttaaatctggaattcctaagacaagtcgttttgcttggatggttcgtaaggataatggagccattactccatggaatttttatgataaggtggatattgaagcaactgccgataagttcatcaagcgctctattgctaaagatagctatttattaagcgagttagtgttaccaaaacatagcttactatatgaaaagtacgaagtatttaatgaattgagcaacgttagtttagatggtaaaaaacttagtggcggtgttaagcaaattttatttaacgaagtatttaagaagaccaataaggttaacactagtcgtattctaaaagcattagctaagcacaatatacctggtagtaagatcacaggtttatctaacccagaagagttcacttcaagtctgcagacgtataacgcttggaaaaaatatttccctaaccaaattgataattttgcttatcaacaagacctagaaaaaatgatcgaatggtctacagtctttgaagatcataagatacttgctaaaaaattggatgaaatcgaatggcttgatgatgaccaaaagaaatttgtggcaaatactagattaagaggctgggggagattgtctaaaagactacttacaggacttaaggataactatggtaaaagtattatgcaacgacttgaaactactaaagctaatttccaacaaattgtctacaaaccagaatttcgtgaacagattgataaaattagccaagctgctgcaaagaaccaaagcttagaagatatccttgctaactcttatacctcaccaagtaatcgaaaagcaattagaaaaactatgagcgtggttgacgaatatatcaaacttaatcacggtaaagaacctgacaagatcttcctcatgttccaacgtagtgagcaggagaaaggaaaacaaactgaagctagaagcaaacagttaaaccgcatattgagtcagcttaaagctgataaatctgctaacaagttatttagcaagcaactagctgatgagttctctaatgctattaagaagagtaaatataagcttaatgataagcaatacttctatttccaacagctcggcagggatgcccttactggggaagtgatagattacgatgaactttacaaatacactgttcttcatataattccacgctctaagcttactgatgactcgcaaaataataaggtcttaactaagtacaaaattgttgacggttcggttgctttaaagtttggaaattcttactctgatgctttaggtatgccaattaaagcattttggactgaactcaataggttaaaattaattcctaaaggtaaactattaaacttaactactgattttagcactcttaataagtatcaaagagatggttacattgctcgtcagttagtagaaacccaacaaattgtaaaattgcttgctacaattatgcaaagtcgctttaagcatacaaaaattattgaagttcgtaatagtcaggtagccaacattaggtatcagttcgattatttcagaatcaaaaatttgaatgaatactatcgtggatttgatgcatatttggcggcagtagtagggacttatctttacaaagtctatccgaaagctcgcagactgtttgtttatggtcaatatctcaagcctaaaaaaacaaaccaagaaaatcaggatattcacttagattctgaaaagaaatctcagggctttaatttcttgtggaatttactttatggtaagcaagatcaaatatttgttaatggtacagatgtgatagcttttaatcgtaaagatctaattacaaaaatgaataccgtttataactacaagtcacaaaagatatcactggctattgattatcataatggagcgatgtttaaagcaacgttatttccaagaaacgatcgtgatactgccaaaactcgtaagcttattcccaagaaaaaagattacgataccgatatttatggtggctatacgtctaatgttgatggttatatgctgttagccgaaatcatcaagagagatggtaataagcaatatggtttttatggtgttccaagtagactagttagtgagttagatactctaaaaaagacgagatatactgaatatgaagaaaagctaaaggaaatcattaaaccagagcttggtgttgacctgaagaaaatcaaaaaaatcaagattttaaagaataaggttccgtttaatcaagtaattatcgacaagggcagtaaattctttattactagcactagctatcgttggaactatagacaattaatcttgtctgcagaatcacaacaaacattgatggacttgattgtagatccagatttttctaaccataaagcacgaaaagatgcacgaaaaaatgcagatgagcggctaattaaagtttacgaagaaatcctatatcaggtcaagaactatatgcctatgtttgttgagctgcatcgttgctatgagaaactggtagatgctcaaaagacctttaaatctctaaaaattagtgataaggcaattgtattaaatcaaattttgattttgttgcattctaatgcaacttcaccagtcttggaaaaattggggtatcatactagatttacattaggcaaaaagcataatttgatttctgagaatgcagttttagttacgcaatcaattactggactcaaagaaaatcatgtatcaattaagcagatgctataagcagaaaaataaatactaaaaaagagctaaattacttagtctaagattaagcaatttggctcttttatattgtcacaaaggacttacaatacatctaagataaggattaggtataagaatattagtgctagggttattaccataatgaaatgacatacatctaagatgaagtaactaaatataaagtaccatctttgggttattaccataaagaaatgtcatatatctaagatattatgaataagcaaattataagaattttaggttattaccataaagaaatgtcatatatctaagataggtattctttaatacttatcttagaatataacttaaaagccattgaacctgtcaaatcttttgtgtaaatagttctttctcgcaaattgattttttaattatttattcaaaataagattctaaggtatcctgaacctgaccaaagcctttatgaattcggttgaaatagcggtcattgtagctcattgcctggatgccaataaatgcatcaagcgactgttcagttggaaattctgccttaggcttagctttacgcttgatgacgttgttaaaggattcaatcatattggttgaataaattgaagctctgatttgtttgggataattgtagaagaccagcagatcgggctcaatttccttcaaacctttgatgacatggctataagctttattccatctggcatagaatttgtgcaagacagctgcagcttctttttggcttgtctgttgatgtatctgcttgaattcgttcatgatcttttcgcggtcatccacccggactttagcacagatattgcgcatgacatgaaccaggcagcgttgaaaatgagctttaggataagtcctggccaaggctgttttcatgccaacaacaccatcagaaagaaagagttcaacttgcttcaagcctctggacttcatgttttgaagcatctctgtccagacttcaatgttctcactaggagcaatgcagtagtcaatgacttccttatgtccattaggtttaatgccaatggcaatatatactgcttcacgctcaaacgtttctcggcgcaaaggaaggtatgtcgcatccaaatagacacagaaaaacttgtcgcttagcttgcgcttgtgataagcctcaaccttggggagcatctgcttggaaatatttgatacttgagctggactataatgactgccatacattttctcaatcaagtcagcgatttctctggtagttacgcctttggagtagagcttgataatcgtgctttccaaaacatcagagtgctgcttgtagtcaggcagcgtgtgctgatgaaactgaccgttgcggtctcgaggcacttgcacttcaattggtccaaactgggtatcaaccttgcggaaataagcaccatttctagaattgccagtattccagccatttctggcatagggatcatagcctatcaactcagcttctagcaagttattaacagcctgttgtagctctttgcgcaataaatcatttattttgtctggattgaatagagcttgagcaaaatctttggtaaaatcattcatgaaggagttcttctttctgtatgtgtttttttgttcaaaccaatcatacgagaaaggaactcctttttctaatgtttaaagaaataaatttaaggaatcattcatccttacacaaactattttacagtctccaaaaatgaggtaaaactatgaagtctaatcaaattagtgtaatcttagttcacacagcaccattcttagttgagtataagtcaattaagaatgatattgatacttttcagaaagaaatcaattgtaatttttttgatgttaagtcattcaccatcaatgataaaaaatatagcttttactacgatgaatcaggattgtacactaaaaaaacagttccttcattgattaacaaaaatggtgatattctgttagtcaataacttcttcatttgcaaggaaaagcaaacagaagaaggaaaaatagcttcaagcttaactgctgatgaagctaaggctatcatgtcatcacatttttacaatttaaatacaactgatggagttatcaaagtaatgatgatttaaagaagaaggctattgagaagggatcctcaatagcctttcttttgcttttaactatgtggtgtcttttccaaggaaagacaccaccttctttctttgaaaacgttgatatatcaaggagtaaaactgtattttaaaattgatggtgttaaaatataaataaagcataaaaagacaccataggtgttgaagcctgtggataacttctgaaaaagtactacataaatagtcaaaataaagtgtgctgagagagcaattctaaggccaagttcatataaacaaattgatgactaatcatataaggctgtagaatgttaatctctgaaagtgctaattttaaagcaaaaaggataaaaaatgagtaataaaactaaaattgtaaaaccaattaaagatgcgtgggttttaaaaagtgtgcaagattcgctaaaaaaagattttgatactggtatgagaaactttacaatttttcaagtaggtaaggcaacattgttaagagtaagtgatgttctgaaactaaaaaaatcagatgtctatgattatgatggtcaaatcaaacgaaatgcttatacgattgataagaaaacaaaaaaacacaatgtcttatacttaaaacctgttgtcaaagatttagaagattattatgtttggcttcaagaatggcaaagcaaacatccccaacaacaggtatttacaagtcagtggctttttccttcttttactagaccagaaaagcatattgatcgtaaacgttactatcggataatgtacaaagttggtcaaaaattaaacatcccttatttagggactcatactatgagaaagacaggtgcctttaaagtgtatgaacaaacaaaccacaatatcggtttggtgatgaagcttttaaatcattcatctgaagaagtaactttagcttatttaggtttagaccaagaaacacgtgaacatattcttgatacgatcaattttgattagaattgagcaaagaaaaaataaaggtgaaattttgctatgctctgattaacaagaaaggacgtagcaaagaaatgagaatactagatgttgcttgtggttccaagatgttttggtatcaaaaccatgaacctcatactacctacatggatataagagatattgaaaaagcgatcttagatcgaggtaaggaaagaaaaatcaaagtacatcctgatataattggcgattttagaaatattccctttgaagataatacctttgatttagttgtattcgaccctccgcacttaaaatatggtggatcaaactcatggcttgttattaagtacggtaagttagataaagaccattggcaggaagatctttcaagaggctttcatgaatgccttagagtgcttaagcctaatggcactctactttttaaatggaatgacgatcaaattaagttttcagaagtaattaaagcttttggacaactaccaattttcggtgacaaaagatctaaaaccaaatggtcagtatttattaaaactatataatgaggaaagaaggtgaatatttaatgatgagtgtggtcaatgtggcccaggatcctaaacaattatcatcaagaaaacgatcaccgcatgttaatgatatgaagttaattatgaaaattattacttttaaatcttcaggattttacactttaggattacgagcaaaaatcaagtttgaatattactttatggatgagctagatgaaatgtagagctaagtgaaaattctagtgaataaaggagttgcgtttttacgtagctcctttttttgcatagaaatagcatatttggagtaatagagaaaatcagaaataacaaaatgaataagctaaacttctaatcaaggatggaagaaaaagtatgaaaattaaaattgctgaaaattttgttattaaagtaccaagattcactgatgatttaaactacttgaaaaaactatataaattaaatttcggtatgtttaaatttgaaaatgaagactacaaaaatctgaacgaaaaaatcatcttatcagaaaatgataattgggaaaaagcgattggaattgcgattttaaatgttaagctgatttctaaacaaatatttactaaggtagccactgacgattatccttattacaaatacccatatataatgtttagctcaaaaatcacgtatgttgttgaagaattagcaactaagactattccaaagctaatcgaacaatacaaaagtgggaaagacgaagaagtatattcgtctacctatatatctaatgccgtaatatatagtatccgtctcatggacaatgaaaatttacgtggctcatttgctaaattagacaatttacctaaaatcgaggataaacgtagaacatggcagaattattacgatgaaaaaagacgctaccaaagactctatcataataaagagaattttgattatattaagcgtttaaattatgttaataagagaattaattattttcaaaatgtcaaaagggatgctaaagcagaaattgatttcttgaatgataaattgcaatatttgttagatttagagaataagctaacaaaaggcaacaaattcggtgatacaagctttttgtatgatattttgctcaatgaaagcaaaaatgaatttgaagatgctattaaaggttatgtcttccaggagtatattgaattagaatctcgagtaaaaaaagatataaaagaaatgcagagtgaagacaaattagctagtccacttgagaagtttgttgacgaaaagaaattactagaactaattatcaaaagtgccaaaagtatagaaagtcttgaccgtatttgtacttatatgtctgaccttgaaattttagatccaagaaatttaactcaagtaattgattctaatacttatttgattgaacatcctgtactgttagaagaatattgtgaccttagaaacgatataaatgctgttttaaatactctaaacgataacgaagagaacacgatacgattacgatatttgattcccagaacgaaaaatgaagataaaaataaaagaaattataagaaaaatgacggtactgtacgaacttatagagaaataggactaatctttggtctatcggctaaccgaataagagaacttttagctaaagggtttcgcaagttgtggcatccaacgagatctgatattatacgaccatatttgtccatgaatatagcagatgaaataaatgaggtaagggatgaacataacatattaccaatgaactggaaaaagtaaatatattgcattatggagctaaccctttgtaaacatgatattgatgctatcgtaaaaccataattgataaaaaatgaggttatattatggtagaaaaaatttttgaagttaaaacattttttccagtagatgctgacatggatggtaacgaaagaactaccactaaacgagtagtagaagtattagaagccagtcctgaagatgttgttaatttatataacagttatttagagggagattacaaggttagcattagttttatcccccctgccaagcaggaacaaaaagaaaatgcagatcatgccgatgataacagcaaagaagcagtgattacaccttttgatgtaggaaaagccctagacaagcaaggcataccttatcgtgccaccttaaagataaaagacaaaggcgactacgaagatatgattaaagttattcatttagttgaagcagatggctttaatttaaatgtttcagttactcttaaaatcaatgaagatagtctaattaatttagatgttccaggaacatggactgaaagagaaaatgcaatttttaaggttagtcctaaagcacataccaataaggtagaagaacttaagagtttgtatgaagcaattaatcgagctggttatgaagcaaaaattgatattactcctaaagcgccagaagctaataatatggatgatgataatgatacgtttgctaatcagctatctgcttatccatctcacactctagttaagttttcacttagaaacagtgctgattagaggtggatgaatgttaatcgaaagacgatggacgatgcctaataagaacacgttttctattaagccaattcatgatcttcttagcagtgaagtagagcaaaataaaatcgtagttgatcccttctcaaacggtgaaagggaatttggaagtttaactaatgatttgaatcctaatgtagattcagactatcataaagatgcattacagtttctgaaatcaattcctacggaaaatgcggatatcgtactatacgacccaccatactctactaggcaggtttcggaaagttatcataattttggctttgaagttactcaagcagatacgcaagcttcttggcgtagaaaacacttggacgagattgctcgaatattaaaacccaatggtaaatgtatttgctttgggtggaattcaaatggagtagggataaaaagagggtttaatctctatcgagttttgatagttgcacacggtggaagccacaatgatacattagttacctgcaaaattaaaataaatcaaaaataatcattattatgttaaattattgagccatagaaaatggctcttttttaatgcattttgaataaaaagggatgctgagagggcgattctaagatcaagttcataaaaaagactgataactaaactaataaagtgagttaaatattaggcaagttcaaaaatatcaaataaacagaaaatgctcaatcttgagtaaacaagaattacacgtctaaaaatgctaaagttttggtatacggaaaggaagtaaaaaatgaaaaagctaaataaaaaaaggcttcactctatgaaaataaaacagaaaaagaaaataaaacaagatttgataaatggcagtgattatcacaacacaagagaaaaattaaaatattttgacttactaaataaggaaatatttgctaaggacaaagtttggctttaccctaaatttttaacatcagatattcctaaaaagtacaaaacgattaatgaagcttgccaagaaaatgtagaacaagctatgtttgaatcaagaaattggcataagcatgatactcaaaatgaagcaagcaatagagatatactaaagccatttgttcaaaatcataaatcatttaaatggttggcagtagtatcagatattacatctccagatcctgaatcgcataatagttttattcttttagaccatattctattgcttagcgatgaaaagaaaatgagctggtgctactttacgcaatggagccatgatattgcaattgactatcatctttggctaccagtgaataatattaagtattttgaaaataaagactatcaagacattgctattggggatgctgttgtaggagagagctatgctaaacgatataggaccaagggaagaatacaatatggctttggcttaactaacatcttgcactgtggtgtcatgaaaatggatgcaactgttgctggtatacgtggtgctaccagcattaaccctagaattatctctgattatgatcgtggcgatttcttagtagcaaaactagtttattcagcagtctataaggcaagcctaaatcgttaccgtaaaaagacaattgataatcttaagcatattaatctgactattggcataaaaattattaattttgaaaaagaaaactatcattcacgcttcactgacggtgatttactagctgaaaaatttaaagaaaaatcagaacaattaagtcaaaatatagatgagaaccaaaccaatggcttgcttaacagagtttatcctgaaagcaaattacctgcttttcggataaaaatggatcacaaatttcaatttaataataaaaataaataaaaaaatgcatttcttaagtcaatgttattaagtgaaaatgcattctttatgcaataagaacaaacagttaggagaaagaacatagaataccgccccatctattgatgaggggatgaatttggtctttctcctgctttttttgttcattctctggacttttcctgaattagcctgttttttcctgctatccttaaattattaagtcatgtggtaataagtcaaatgaaaggcgatgatatttgttctttttgatcataaatttgagtatatgaaactaagccttggtaaaggttgattttttaaatgttaaacttttgtttacttttaaatttagaccaatttttgaaattaagacctcggtgtcctgtacagtttgtcatctttgagcaatttaaagataactcgtactaattttcttgcagttaatgtgcaagcacgtttatgcggcgagtagacagcttcatcatacttcttttggtaatattttttgaaaacaggatcatgtaatcttgctagattggcagcttcaatcaagtaatatcttagatatctgtttccagtcctggccattggagtatgttcgttgctgtgatctcccgattgatattgattccaggttaggccggcatacttagccagctgttcttctttatcaaagcgatcgatacttccgatctcagcgataataccagctgtataggttttgccaataccgggaattgattccagaattttgctttctggtaatgcatcaacgatacgatcaattgctttttctagatctttaatagattcattaaagctttgaatcatgttgtaatgaacagaaagcactgcatcaattgaatcagtcattactttgcctaagcgatatgaacctctaacagctttcttaattgctttagccaaggtatctggatcggaaaagcgtcctctgcctttaacctgtaagtaagaaattaagtcttcggtaggcatatccgcgatctcatccagagttttactatcggttacaatagacatcattgtagcaccgaaaagaggagtattaatcttatctttatcgacagtgattagtttattaacccgataatataaagcttcaatgaagtgctgtttggtacgagtcagttcttgaactaattcatatctggtacgcgttaaacgctctaaagcaagatagttgtcttgtctggcaatgcttactcgataatgtccaaagcttagatacaaagcaatgtaataagcatcgagaggatcagttttactttcttcaaagactttatgaaacctgctggtttctttggggttaattacatcagtctctacattgagcttttgtaaatcttcgtcattttggaaaaagtaagcaggatgaaaactgtaaatagatgtagcttccatgccaataatgatttgatcatagtgtttattttgagctagatctaaaatttgttttttcagttcactagcaccataaagatcattgacaaagctatcgttaattaagcgtttgttttgatcttctgaatcaagtgcaacgacctgtaaatctttagaactaacatcaataccgacaaataatttcattggaaatggcctcctttctttcaaatttctgatcatagattttgatcttcacatgttaacccctaattacagttcttaagttcaatctcgccagtataagtattcactggttgcttctttgaaagctgcacctaatcccaattgctcaaggactagcaaaaagaagcaatcaatacagcatgtgagttagagcataaaggaactgcctgggtggcagacttataaagcagacaaaactgcaggaggtgataacctagaccagttgaccaaagccaatgacaattagaggctaacatgcgaagatcaaaaagcaaatactaatttgattaattatcacaatatgactaattacaatttatataatacgaggaggtgaaactatggcttttaaaactaagctggccgtcagaaaatgggactgcccatattgccaagcgcatcatgatcgagacgtgaatgccgctaagaatatcttggctagggcaatcaactaataaagtaaaataaataaaatataggcttgggccaagccttgctaagaaaggccgaccgctatgctctggtgggaattaaaaagccacgaagctcaaataaattgagcgaacatttttgaatgaagagcagaagtcaggctgttcgcagaaaaactctaaacaaagagaccacccatctatttgatgggtggtaggtcatttgttactaatagcagtaatatatttatttagaccaccatattgtttaatgattctagcaatttcccagcgttttaatctgctttgatttacaagtgacttaatcgtaatggggcaattatcagaagcattaatgagctttatagtggcatcttctaagcaagcagagcgtacctgccactcccattcagctcgtgaagggattcctagttcttttcgataatcttctactttattccaatacagataaatggacgcaacagggactcctagccgctttagttctttccaagcaggcaaataattcatgttgctattttcaaatacttgtctggatttataaagtatttcttccttacttaccctagattgtgcggagcaaaaagtagctttaatacctgctatttcaagaactcctttccaatctcttttaaaacgatgaatagccgaagctgatcgtggataatcgacagagtggggaggatatcctagctcttgagcaagctgttgtatttccgtgatgtaaatatcatctgggatccatacattaccgtgggttggttgatctccaaaataaacgtagagtttctcaatactttgaaaattagttctaataaaatcgttttcggctttagtaaaatcaagactaactggtaagcggtgcttatttgctttgatgatatcatatttagataaaatataattcttatctaagatcttcttagtcataaaatgagactgtaaaatagtttgtgtaaggatgaatgattccttaaatttatttctttaaacattagaaaaaggagttcctttctcgtatgattggtttgaacaaaaaaaacacatacagaaagaagaactccttcatgaatgattttaccaaagattttgctcaagctctattcaatccagacaaaataaatgatttattgcgcaaagaactacaacaggctgttaataacttgctagaagctgaattgactgcctttctgggctatgatccctatgccagaaatggctggaatactggcaactctagaaatggtgcttatttccgcaaagttgatacgcaatttggcccaattgaagtgcaagtgcctcgggatcgcaacggtcaatttcatcagcacacgctgcctgactacaagcagcactcggatatcttggaaagcatgattatcaagctttactccaagggcgtgaccaccagggaaatagccgatctaattgaaaagatgtatggcagccattacagtccagctcaggtatcaaatatttccaagcagatgattccaaaggttgaggcttaccacaaacgcaagctaagcgacaagtttttctgcgtctatttggatgcgacataccttcctttgcgccgagaaacgtttgagcgtgaagcagtctatattgccattggcattaaacctaatggacataaggaagtcattgactactgcattgctcctagtgagaacattgaagtctggacagagatgcttcaaaacatgaagtccagaggcttgaagcaagttgaactctttctttctgatggtgttgttggcatgaaaacagccttggccaggacttatcctaaagctcattttcaacgctgtttggttcatgtcatgcgcaatatctgcgctaaagtacgcgtcgacgatcgtgaaaagatcatgaacgaattcaaacaggtgcatcaacagacaaacaaagaagaagccacagctgtcctgcatgacttctataccaaatggggcaaggtttacagccatgttatcagaagcttgaaagacatagaaccagatctgctggtcttttataactatcccaagcagatcagagcttcaatttattcgactaacatgattgaatcatttaacaatgtgatcaagcgcaaagctaagcctaaggcagagtttccaactgaacagtcgcttgatgcatttattggcatccaggcaatgagctacaatgaccgctatttcaaccgaattcataaaggctttggtcaggttcaggataccttagaatcctactttgattaaataaataattaaaaaatcaatttacgagaaagaactatttacacaaaagatttgacagtttccataaaatcgtttcctccgatatttctatacaaagaatacaagaaaacgattaaatattgttgatatttcaaaaacagaagaaatgcttgctttaaattaagtatattgataacagtttaggtaaaatagagaaactgagaaatagcgttttaaaaggaatattattaagatatgcaaaaataatgaaaaaactaaacaataggagataaaaatggacttagaagatttattatctgtaattaaaaccgatgaaagtggttttacaaataagattgaagatatcaaggatcattacttggtaaaaattaaaatgaagaagtatatgtacggtaatcaaaacacattctacgcattattttcaaatgtagatgatgatgattctgcagatgatcttgtttatgccaatatgcacatgagcaaatattactttaatgcgcatgtacttggaagtaaagatgaaaatggcatttttaaaccactagtagaaagtgattttgaaggtgatgaatattctgctgatagaagtagtcaactttacgttagagattttgctatcaaaacggagtgcattgctcacattgaaattgtaacgtacggatgataagatatattttttaacaggcaggcacataatatagaagcaaaaaaataaaataaagagcctccatctatttgatggaggggtaggttatgaaaaaatgtaactagaatgctgacaagtaataaaaataaatcaaggaggatattaatggaagaggagaccaataataaagaagagcaatacgtatgtcctggtttgatttttaatacgcatgataaaagaataaatgacttttttgttaaaaaaagatggttcttatttgtgatttgcctatgctcaggtgttataagtggtatggctttaccagtcaatactcaatttcgtggcatagcattaataggtgtatggcttttagaaataccaagttggttaatttggtttactaccattggcagatttagacctgatttcttttggggacatttgaatcctaaattatgtatgatgcatcccatatcagaacttaaaaatcttgtacaagaacaacaaatacaagaagaaaaatttcaacagtctaataagcgagagaaaagcaaattggttactttattattccttcaaattgcaattgtgttgtggatgagtattgttcatcatgtggatttatatatgctgataggtgctgtggggttatcaggctacagtttattctacttatggcttcgtaacttgttttctagcgttgatattgaatggggcaaattctcgaaatcaaactaaatactaaaagaatatactaatctagtgttagaagtcattcgacggaatgactgtctagcgcttttatttttgctttaaaataaaagttaagatgaagcaataatgccgtaaggactttgggcacttgatgccgttacaaaagtggacagctttatcttaatgagaacattagatttttgaaaagggatgtttcaattatgtgaaattttctgttttttatttgattttaagttcttagataactagttatttatcttgtttactagctataaaaacaacaaaaaaaggcgcttagcgtcttttttttctgcccgtaagcttggtaaattttctttttttgagactagggtcattataagaaaatgtcatttcttatttctctaaaaaaccataatcataaatatagtctctgatattattttctaattgctgataggcaggtataaagatattagtgtatgtattaggtttagtaccattagtcataatccttctaatttgctcccagccagcatcccaacgagttaaacagaactcagggtaatcatcatttaacagttgcctaaagcgaaaggtatctttaacgactaactttgatgcattcaagacagacgttgctgaatcgcttaagtcgtcttgatgttcttgaagccaatggtaaacaaagcgttcatcatcttcatcaatgtcaaagcccatttgtgctaatcgattatcattagccaacttcttcataaaatctttgctaagccaaaagaattgatttttaatgtcatatgtttctcccaagtaatccacatctgaaagagaaacttgatagctataggtattaaacaaagaataaactacgcaatcggccataatctttcgatattcaggagagttaataagagcttcactaggcttgttataattgtctttatcgtttatccaagtatgctgagaagcctttctaatagcaaaattaatcatacatttttcaaagttatctatggttataggcaccccacgctctctactacaatctgcagaaaacaagccagtttcacgaggtccatattgcaccatatttcccttaaaccaagcatatcctaaagcatcattaggataataaatcttgggtcgtcttgtagataacttaaaagcagacgtaaatagaggtgtagccatatgaatatctttatctggatcatttctccacttttctttaacccaatcagctaagttatccttgggatcttgctcactcaaggtatggatatataaatcctttattccattgaaagtgctatcctttagcattaatggaaatttgttctgaataatgtttttagttttactagttttgcttactaaaactgtaaaacttattccccaatttttggccgtatcgctaaattcaccagaattaaataaaaaaccagatttaaaatcaaattttttaaatatagcttctttaagtccatgaaacttctttccaccagtcatatactgcgttttacagaaaaatgcaataaccacattagttaaactgaacgcttttactagcattaagatacgatagtagaattgagcgtataaattttcagaggaagcaccaatattcatatgtttattaacttcggtttcagccaatccgcctttacttccttttcccacggtgtttccagcagatgcataaggtggattcatataaaaaacgattggcctattgtttaataaagcttctactaacccaggagctaatttgtacaatttagatttagtataatttttaggacttatatttacatcatcgttcaaaaagtcatattgaaaagctacattatcacggttgaacatcttgcctagatttaactcgccatcgtaaagggtagaggagaataagttcttaaatttaaagtcacgtgtaaggttcttagaaccagcagatgcatcccatacgtaatatttatctttccaatcattgcctaatacatcactaattgcattaatggcctcattagcccagatggttggtgtccaatattcaccagagaatcttcttgcggtttcttctagcagtacatccccaacttccgtaatactttttatttcatcggaattatagttagtatcaaagcgtgagaagaaagcataccaattacgcccattcacacgatagtcttggtaagtaccattatcatgtttaagagtagccgtattgtttctgataaagaaagcatcatgattagtcagtgcattaataaacatagaaactaggtcctggtcagaagcaaccttagtctttttctgcgtaactaagcgtaagaattcatcataaactccacgaatattagcttgattaactggtattttggttaacttagtctcttcatcagcagatgctaaatcagcaactaacccaataacatcgttaagatcaaagtcttttgcggtaatatcatagacataaggattgatgttcttgtcattgtgcaaacgatcaaagagttcaacaggtttaagattgtcatacacttgtcttggactgagttctttccattgattgcctaagttcatatctaaatatgaccacagtacacgtgcattaatgacgaatacttggtttgcatcggcagccaagacaacattaggcatttctaggttaagcttattaccgtcagcaatgtgccattgaatgtgctttaaatagtaaatgacttgtcctagaatacgttcttgctgattacgatgatccattgctacatcagctttaaattctgtaattagatttaaggaaacagcaatgtttcttacgaatagtagaccatctgtctgtaataatttgtcgatatgagtactgtagccctcattgccttttacgtctgcaaaacagtagttaagaactgaataccattgcgcttgtacagcttcttcttgtttaacattagaagcactactgatactagcaatttcctttagcgcagataaaaaatccttctgtctagtctttggatattttcgccaagtcaagccaccattagtaatctcaaagcgagaattaatctttttagcacctaatttatcgatgtatttaacgtgttctttcatatagtcttttctctctatctatttttcttataagaaagatgcaatgttaggtaggagttatgcatccatcctttatgtaaaagtataacgcaagcttaatttgtttcgaaagtgcaacttttattcgtcttttcaattaagttaagctgaatgaattcgtaaaaacgaagtgctaattttgacagtttaagatatgtacgaaattagccctgtgctaaaatacacattagttataagaaattaacagatagagtaggaaagttttgtctttaaaagaataaggcatattatcatgaataatttaaaagagaataaagaagacagtgttgcagaacaatatgattttaaacaatcattgaataaattacttaaagcagctaatgaattggacaaaaacaaagcataattaaaagctacccgaaatgggtagcttttaattaatatactcttatttgattaaagttctcttttaataataaaaagttattactctaaaagatgacatacatctaagattactccacttaacaccacagatcttcatatggttaccatcttgaagaaatgacatacatctaagatccgtgggcgaccgcgctagcggactctggtggttaccaccttaaagaaatgacatacatctaagatagatattctttaatatctatcttagaatatgacttaaaagccgttgttattggatcttaaatgataattaaattatagcatagctgattaataagccaaataggataatttcgaaaaactcttcccatatttccattagttttactaaatagtgcatttgctaaaaatgggagagaggagcaatagctgacttggacccatcaaatagaaaagatagcggttgactctgatgtagagcataagtttgctagttaattggtaaagtagctaatgaattgaacaaagtctaggaataaaagatagatatctcagataatatatcctttaaagaacatcatattattttagttaaaaggccatttgtataatacaactctttaattaaagttcttcttttaacaaaagagtttacataataattattatggtataaacatgcagggcaatagaatttatgatagaagaaaacaaactatgctgatatactatttctaagcctaaatagattgcaattgcttgggctattgcaaccagcatgttttagatgctttgggtaaattagctattaacctagccaaagcttacgcaataacaaaaaaagccaatcacaaggattagctttactaccagttatctaaaactacgattgaagtcaacgaccgcaactcgcaactcgttggcttcttttcatatgcaattatagcatgaattagccatctaataaagatagtggactgtctcactgtctttttggtaaatttgaaaatacatttttaagaactacattaagaacatactcatcggtgaaaacaggcttttaaccattattaaagctatactttgttgcatatttgaactatcaagagttaattttccttgctttataatgtattcttcaatatggtcaggaattagcccacgacatttaatttcactctttgaatagcccaattgtttgagcatttcatcattttcctcaaatggactgaggacctttaacatgaagttatatcgcttaataccatatcttttaagcctctcaggatctgaacgatatttttgcttttaacgcccctttttgtttaatttataattctttcaataaaacagtaattttaataaaagagttataagccctctttttcttgaaaattgaacataaaaacaaagattatatgcttttgataaaatttacttaattactaatttcctcgaggaataaaaatgaaacataatttttttagattaatatttatatttttaggaataattagctcttttaatggactggtcatgtttttcattacagccatagagcttaaaactatttttctaaaattagctgttgtagggattgtgtttggaatgctatttttggctgaatctcttcatctttttaaaactgctaagacaataaaacatgcggagagtgcttttaccttatatcttgactttagcttctttcttttgttattaggatggctaaatcttattatgtctggtcttgctgtaaatttaggtataatatacaaaatattatcggttattggctattcatcaatcgttttatttctaatatgtattagtattgctccaatttattcatttataagtgtgttcaaaaacaaaaagttctaaaaaggtgttttttcaattttcagtttttcttttcaagagttttaatcagctggtctaaaattaacttcacacgagtaataagtttagttgtcaacatattttgcttacaaaaagcaattcctgcttaaagtgctgaatgtattatattaaacctactcctttctaaaatttcgtaaaatagcaccagaaataagtagtttctgtaataccttttgaaaattaattacaattccaatatacataggaataaacaggtcagaaaaagcttgtcgaatagttgcatcaggaatcaaattattagcaatccaatgtaaaataaaggtcattaaacaacattcaaataatcagataaaaaaagattgattatccccccataacaatgggtgataaatcaatcttttctttatttaaatattcttaattctcttcagagctactatgctctcgtctactcaagccctcagctaacattttttgtcttcttcagacaatacaggctttagttcttcaactttacctacccatttaagcaaaggctgtacgcctagatagctgtcttttttcttactattcatctttatttttacgtaatctaaagctaaatagtccagataaagtagcagcaactaagcccataatagacaagaagtccttgctttcaccagtttgtggcaatgttgaattagacattttttctaggtgtttacttatggctgttcttaacttggattctgattttgttgttacagttaacttttcgcctaacttcttatgatctgaatgcttttcctgtactgaaatcgtatgattcttcttattatcagtcttaacttcatgagattcagtgtctttagaagtgtcttcagatggttgctctggagtgctttcttgattaatattcttattagagtcatcatcagtaacatttttatctggatttacttccggaatcttttcaattactttaacaataagtggttcatcttttgccttgattgtcacttctttaggaagcttgtcatttgattcatacccactaggtatttctggcgttactttgaccttatcaccagtttttcctgttaccacttgttgaccgacttttttaccgttctcatcaacatagataatagtttgactaccttcatttgcaacatatgtaataactttgtctaaacctgaagtgctagatggcgtaactacaatacttggtacatcgctaatttctgtatatccagaaattgttggtacttctactttgtcaaaagtatgttgcccattctctgaccaatttccataagtaacttcacctgttacttcgtctacagtagcatctctagtaaaagttacggtttgcatggtgatcgtttttttaccagttggatcaataattgttacttttctagttattgtcttattaaggtcatcatgagctaacccatctggataatgcttatcctttgtacctggaattaaatcacctttattcactggtttatctggtgtgacatgactcttgccgtgttcaacagttacagtaattggagtgtcatccggcttgatagttactttgcttggaacctcacccttgagaacataaccatctggcacatcgggagtaactttaaccttttcatcagtcttaccagaaattacttgtttaccaatttcagaaccatcttcatcttggtagacgattgtttgagttccatcgttagcagtgtaagtaatgttgacagtttgatctttcgtcgtacctgttactgcttccttagcaacgtttgactgactagctgtatagcccggaattactggcacatcatagcttgtccattcactagttgtccaatctgggtgagcattttcttgcccagtgacttgctttgccagagtcgcagtttgcttaaccaatgtcgttttaccgtctggtgttgtgacgttaattgttcgggtgactgttttttcaacatatgggatatacatcccgcctactggaacgattgctttagcccgcaactgaccattttgttcgttaaagtcagatagctcgccgcctatgacatactctcgcagcgaacttaaatcaataggtttattggtcatttcaattgccgtagcagcacgatcacctgtggctttggccagagcatttgactcattccctactaatctgaatccagcaaagtccgaatctatattggacttattgacagacaaatacccatgccatgctcggttaacgtaatcaggatcatcagggtagtacttcaaaaaatgttccttaagcttttcaccccatgaaagatcggtaccgacaataataccattaactacctcggtaccattaggcatttggtaagtttgaccgcctaagtttaagctcgtccagtcgtccgcgaatgacacaactttattatctactaaatcgtaattaacgtgtcccgttaaagtaccaacaactcctaccgttgggtctactttttcaagattgtcgtcgtatgactttttaatttcatcgtctaattgcgtccattgattttgtgtaacaacaatacccggctcgctctcatcatcaacatcaaccaaagtcatgaatcctatttgaacatcgactgtagcttcacgttgtacaactttgtgtaccaagtgaagcgttacgtcaccactaccatttgtaaacgtataagtagttggcaattgctgaccgtcagccaattgatatttatcgggcacggttaagtttaggttaaccgtgtcaccggttttccctgtaatggttgtggtgtgtacaatcttcccgtcatcgtcaacgtagttgatatgagtagtttggctattggctgtgtagctaatgtcgatcgtttgattagtcgtatcgctagtaactttcgttgctggcacttcgttttggctcgctgtgtagcccggcacggttggtacatctactttatcaaaagtatgcttaccgccttctgaccaatcatcgtaagtcaccttgttagtaacttcatcaactgttgcacctcttgtgaaggttacagtttgagtagtagttgatttcttaccagttggatcagtaatggttacttctctagtaactgttttgttcaaatcatcatgacttacaccattaaagtgtacacttggattatctggcaaaactgttccattttcttttggattatcaggggtaaccttgatagttttgtgttcaatttgaacgactacatctgggtgtccttcagcattaaagctaatttgtgtaggtaattcttgtcctgaaactaattgccaaccttttggaaccgttactgatacattagctgtttctccagtcttccccgttacaggagtgtcttgaattgttttattatcattatcaactaacttaacatggctagtatgttcactagcaacataagttatatcaatagtttcattttgggtatctcctgttacagttttagctgatacagttggttgactggctgtataaccagctactacaggtgcgtcatactctgcccattctccaccagtccagttgccggtttcttgacttgctaatttatcatttctagcgtctggaagtgtgtatacagtaaaaacaggttgttttgcatcagctttttggctgacggtctttacttctccatttggtaagtgaatattaattgtacgttgtgctgagtgatgcttataagtatatggaacataattaaggaaaatttctcgaccactgtctatacctgttgctccgctatttagttcgctatccaacttgggtaacaaatctaaagttagtttttcaggattgatgtgatctaccgcatggtcaccttgcataacttcaggggaacttgtagttgtccaagtgaagttaggatctactttttcttgatattcttttaaattcagccaacttttgccgtcaaataccaatgaggttttttctgataaataataaccatcagcatgtagtccatcttttagccaagtttgagtgctgattacaccattatcatgtgcttcactaataagcttgtccaactcgttatactgctcttcatgctgctctttatactgctcgttatactgtgggtgatctgcataataaatactaccttcatttatatatgttttatccaaatcacccaaactattaatagcatctaaatcttttgcttccgtagcatcatcatcgtttccattaccctgataaatatgattataatcccaagttgcttctcctaagaagcgttccgtcaccaaatcatatttctgtgtacctttaataaatacttcctgacctgctatatactcataactatttggagatttacttaaacctgcacccaacagtccagataaagaaaaacttgcactttgtacaaatctttttgttacgtttatctgtttagttttgtgctttaaatgcacaacgattggatcaattgctttatttccaacagttatagtttcaggcaaattttgatttggaactaaaatataattttcaagttttttaactatcttgtatattagtatttacaatttgcccttcttttactgttgatgtatcagtcttccaaatcaaattaccattttcatcatcatctacataggtaattgagaatgtttgagaatttcttttgtagacagctactgttttttcactatctggggtttgataaatagtttgcccatcattttcgtctaaatcaaaattttgtataaatccagaggattccaattcatagtctttaggtacaggaatatcattataatcaaaatatattgaaaatcggtgacttggtttattagttatagtactagttttaattcccaaatcgttaatactatcaacattcaattttgcccctgtttgagagattttaattccttcagaagtatattttccatcctttggagtaaaagtaatggttaatactgtgtcatctgcaaactttttaccagctagatcatcttcagccttatgaagtgctttattatttggagcgtctttgtctgcataaacccaatgaaatgtatcgtgccaagtaactttcttttccttttgttcattcgtatctacattagatgactccttaggctttacttcaatatctttagaatcaggagctcttgaattgttttcgtcgtttaaattagtaggtttggcaacagctttcgttgtatcacttttatcattatttaagttgttttctttaactttaattgaagaatcttgagatgtttgtaattgagttttttcaaaagttggcgcaactgcactggaatcttctgatttgctctgatctgaggtatttactaccgcttgtttattggtattatcgacagtaacattactagttgctggattattagcgctatttgtttctacaatttttagactagtatcagtgttttcagctgctttaacttcattagagtagcttaaaaaggcaacagtcccaatcacacaactgactgcaccaatagatagttttcgaatactaaatcgttgtaatctttccatttcttatacttcctttttgaataaataagctatttttaaatttaaatagaagtatagcattgaggtgaacttttactttttatcactatatttgcgtgaaaatactaccttttgtcttttttatttttacgaaattttgagactgtaaaatattttgtgtaaggatgaataattccttaaatttatttcttaaaacattagaaaaaggagttcctttctcgtatgattggtttgaacaaaaaaacacatacagaaagaagaactccttcatgaatgattttacaaaaaatatagcacaagctctattcaatcaagacaaaataaacgatttattgcgcaaagagctacaacaggctgttaataacttgctagaagctgaattgactgcctttctgggctatgatccctatgccagaaatggctggaatactggcaattctagaaatggtgcttatttccgcaaggttgatacccagtttggaccaattgaagtgcaagtgcctcgagatcgcaacggccagtttcatcagcacacgctgcctgactacaagcagcactctgatgttttggaaagcacgattatcaagctctactccaaaggcgtaactaccagagaaatcgctgacttgattgagaaaatgtatggcagtcattatagtccagcccaagtatcaaatatttccaagcagatgctccccaaggttgaggcttatcacaagcgcaagctaagcgacaagtttttctgtgtctatttggatgcgacataccttcctttgcgccgagaaacgtttgagcgtgaagcagtctatattgccattggcattaaacctaatggacataaagaagtcattgactactgcattgcgcctagtgagaacattgaagtctggacagagatgcttcaaaacatgaagtccagaggcttgaagcaagttgagctctttctttctgatggtgttgttggcatgaaagcggccttgaccaggacttatcctaaagctcattttcaacgctgcttggttcatgtcatgcgcaatatctgtgctaaagtccgggtggatgaccgcgaaaagatcatgaacgaattcaagcagatacatcaacagacaagccaaaaagaagctgcagctgtcttgcatgaattttatgcaaaatggaataaagcttatagccatgttatcaaaggtttgagggaaattgagcccgatctgctggtcttctacaattatcccaaacaaatcagagcttcaatttattcaaccaacatgattgaatcctttaacaacgtcatcaagcgtaaagctaagcctaaggcagaatttccaactgaacagtcgcttgatgtatttattggcatccaggcaatgagctacaatgaccgctatttcaaccgaattcataaaggctttggtcaggttcaggataccttagaatcttattttgaataaataattaaaaaatcaatttgcgagaaagaactatttacacaaaagatttgacagtttcgaaattttcctttttgctatgtatttgaataatagatatacaaagaaaggaatttttaacaaataaaacgatttaggacactttataataaaacgcttaagactagtcaactaccctagactgaggtctagggtagttgacaattcatttattatcttcctattttttgctgttagaaaatttgtttaccatgatttttcaggatttttcaatttctctttttaagaacttgatccaacttgtttaaagttaatttctcacgagcaataagtttatttatcaacatattttgcttatcaattatatctaaaagctctgagtaagttggaattttttcattaactctagggacattcgtagttactggattttgctcattatgcttttactttagagcttgtatagctttatcagcaattacttcttgatatttcatttcctgttctttttttctaatatgtttttgccttaaatcgtaagctaatttcatttttaccatacctctatagttgtttcttattcattcgttactcattgtatggggcaacaaaatcataattacgttgtaatttacagatgacttcttttacggttgctgacttataaatattaagaacccgttgacgataagctttcatcatttcagaaattttaggtttcaaattaggattatctaagttgtagccctgtgctaaaagactgtaaccatttttaattgtaataatttgagctttcaatccgtgaaaaccatcttctgttggttcatttttatcaaaaatttgattagaacctgctacataatcaccttcacgtaatgaattgagtcttaaagccaaaatagcgtctctaataagacttacacgaaattgttcttgtgacattacttgtcctttctaaacaaaaaggtctcgctagaacgagacctttttttgtgttgcatagatgaaataaaaattgttaataatactaactatttcttaatagcatccttgagagtcttacctggtctgaaagctggaatcaaagttgctggaatcttaattttctcaccagtttgcggattgcgacccttacgttctgctcgactacgaacttcaaaactgccgaagccaaccaactgaaccttttcatctttacttaaagcttcagtgattgcactaaacactgcatctactgcatctgtagcatctttacgtgaaagatcagctctttcggcaacatctttaactaattctgatttattcatagaattacctctttacaacatattatgaatatttgcggtattttagatacctcactaaaaccaaagataactagcgtttatcgatcatttatccttgattcaatttcaatatacaagataaaaaaatctaaatcataaactctccagatagcaaaaaatacatccccaaaatggaaaacgctataaaatagttattcaatcaaagggatgcattttgtatatttaattttctttgctagtttgtttttccttatttttacgctgattcaaacgatgtttctctatttgaaaaaccttagccttaatgcctttgatattctgttggttttccttctgcttttgtgctataaatgcttcttgcaccgctgagtcattagcatatgtatcaaagattagctgtttaaaatcaattagatcaactagatcagcatcaatgctgtcaagggtcaataaacggtaaacaataacgtctttggtttgccccattcgatatactctactaatagcttgttgctcggtagatggcttccactgtggttcacaaagaatcacgatattagcagtctggatattaagacctaccccacctgcttctatttgactaagaagaacattgtatttggtagatttagtaaaatcactaattaattgctgtctttgacttggactaatatctccagataagacttcgttcatggatgtaggcaacaacttagccaatttaaacagtacatccctcttaaaaaaggaaaatacaattactttacgattcatctgcttagcttcactagcaatttctttaatctgtgcaattttttctgatgcattatcaataaatgctgccctgcgcattttaactagtccacccaagccttcttcaatacaagaatcatagaaatgttgttcttcttcattaaaggtagaccaccgctcaatgattgacatcttaggcaattctttaagaacttccttgcgttttcttcttagataaacagtagcaatcatttctttaaatttgctatcagatagttgtcctgcattaaaggcgtttctgatcttctgggataacgcggggttaagcgcttgaattaattgtttcatttcagacacgttgttttctaatggcgtaccagtcataaatagtttgtatgatgccttattagctaataaatatacgttttgggaacgtttggcttcgggattcttaatataatgtgcttcatcgacaattaaaatatctagctgacctaaatctttcttttctattaaacgtgagcattgctcataattggtcaataatactccaccttgatctaaccaagactgatattccttatcacgtttaacattacgaaagacataagtaggtagtttagaccatttatgaatctctattttccaattttccaggatacttaacggacaaactacaatagcgtatctgctacctatttgatataagtggttgattacaccaatagcttggatagtctttcctaaccccatttcatcccctaataagacgtttcgataggaaagaatatatttagtaccaaaatcttgataagctcgcatattcacagagagatctttagtgattaaaggaaaatgattaacctgttctacaatagctttaggcagagtggcagtaatttgtttttttccttggccagtaagcttttcaattagagaaaagtaaatcgcaccgttagcaataaaatctgctttaattcgtttaagactattgtctggtagttcatcaaacttaagattatctccagcttgatgaataactaatgctgactgataaatggattgagtagctttatgccagtctatgtagtcataagtactaacaaaattcaaatcataattagtaattgcaatagaatctcgaactgacttagctcttagcaaactacgataggactgaataatttgtttttcctgtgctttttgcttaaaggaataattattacaaaacttcaacaaacttaagaagcgaagcttatcagcagtcaaactttctgcattaaatatagggaatgcttctttagataatttctctacaacttgtttagccttggtaatgatcttttctgtatcaatgagtggcattgcatactgtgcttttaactcttgaggactaaaaatagctaaatcctgcaaggtaacattatcagctattaaagaatccaggttaggaaaatttggctcgttactacctaataacctaattgagtaacttgctatatctttagtagcttgttctttttgcaacttattccataatcggatcatttgttcatgataaacgggatagctatgttctttaagattgctgacgattgcgttaacttgatttaacacccatgtgataaagacatccccatgagataacagtctatccacatggggatgcattgtttgatataaagcgtctaagtaaaattgctttgattttttaactttctcttttactggaatatccccatgaaattcgtctttccaaaaaacaacttgactaataaaatcttcaattaactgaatattttgcttagtttcttgtttaacttgcctagactgaaaaatattgattaacgttcccaggtcattatgctctaactgattaagtactttctccaattcagataattgattgccatattgatctaagtatttttcaatttgaagcgaaatttgttctagccagaatagttcagctgtctctttagggatgctcttaccacctgcgttgtaaaacaaaggaatgtaattctgaaaaagtcgcgttttcaaaacatgattggataaagtgggaataccatctaacgtaatttgatacaattcagctggaatatctgcttgatagcgttcataatccctttgtttatattcgtctaccctctgcttaattgttaattttaagttaggtagaagttgttcatttaaataaacctttgcattaaataaatctttggctaactgattaatttcattggaattcattgataatctttccttaactgctccgctcgtttttgatttgataagaagaaacgacaaaataagaatcttatatatagcatacgttttaactcacaaaaatcgcacaaaactcaataatgaccaaaatgtgctaatagcgtaaagcaagacgacatttttaaggaattagaggtaaaacccattttcgatatttatgaagtaaagttatatttgaccgataaaattgaaaaaccagaaaggaactatacagctaatgaaagttagagttaataagaagaacacattactatttctgggaagttcggctatggcacttactggctcaaatgctttgggtcaaacagttcatgctgacacaaactcccctgctcaaacaacaaaggttgccgataaacctaagtccagtaaaacagatcaacaaaaacaaaaagaacatgatggctttactcttgtaacagttaaatcaggtgatactacttgggatattgctcaagaatacgatactaccgttgatgaaatcgttaaagataacaatttatctaatggtggtagcctaatccatattggggatattcttaaagttaaaagtggtaacagtaaaactgaatcaaatacccaatccgattcaacagcttcaagctttcaaactcaaaccagcgctaatgctacatcagtagaatcaaattcttacactggtacaggtgcatatcaagctcctgctcaaagctaccaagcaccacaacaaagccaagccactagtcaatcggcttcaactacctactctgcacctaagcaacaaacaacaaattacacttctagtgcaactggtagtgaaaaggccgctaaggaatggattgccgctcgtgaatcaggtggtagctacaccgctagaaacccttcatcaggtacttacggacggtaccaattaacacctgataagcttcatggcgatttatcacctgcaaatcaagaaaagactgcagatgcttatgttcgcgctcgttacggttcatggcaaaatgccaagagcttctggatgactcacagttggtattaagataactcatacttactagacattaagaatacctaatttgaacatcattcttacctaatgaaatgaactcctatttaaatagacggggcaagataaatatcttgccccgtcttcttaagtttaagaaatatgtagtaactataagaaaccataatagctactttataccttaatttaaggctggtataattgaagttagttacttttaattagatttgagtggttatatggatcaaaaacattatgctaaattaattgatgaagaattagataaactgcccttctatgtcaaagaattctacttggttaaaaatttatcaattactactaaataccagtacttaactgaaattagacgtttttttacttggcttagaacggaaggaatcagtaaagcttctgctaatactgatatggaactgactacacttgaacacttaagaagagaagatattatgatgtatcttgattacttaagaaatagcgtcaacaaacaaaacaagtacaactcccccactacaatcaatcgttcaattaatgccttgcgctcactatttcattatttaaccgtaatggcggataatcgtgacggagagccttacttctatcgcaacgtaatggctaagatcgaatcactccctgcttccaagacacttaattaccgtgcaactgaaattcaagcgcatatgtatcgtggtcaaatgaaacacgactttattgactttcttagcaacaaatacgaaggaaaagttagcaactacgtagctgggcactttaagaagaacaaagaacgtgatattgctttaatcgctttgatgttaggaactggggtccgtgtacaagaagcttcaaataccaatatcaatgatcttgaccttaaaatggggatgctcagcgttactcgcaagggtggtcaaagagactctgttccgattgccaactgggtgatgccatatctaaaagattatgttgcaattcgtaaggagcgttataagccagccgataatgaaaaagcactcttcttgacctcataccgtggtcacgctaaaagaattacttctaatgcgattgaaagctttgtctccaaatactccgaagcatttggcagaagactaacaccgcataagttacggcatacactagctagtgaattatatagtgaaacacattctcaagtattggtatctcaacagttaggacagcgaggaactagcgcaacggacttatacactcacgttgaccagactaagcaaaaagatgctttaaataaaataaaatagcaaaaaggctaatctattgcgattagcctttttgctattttacaaatcttatattcaaaactggatcctaggcaaaagttacgaaacagacgcaggaaaaagcaaaaataagaaaaacaaaaaagcatttctgctgagaaaaaactcaaacaaaaatgcttattaataatcagtaatgtgattcatgtactattaacccactaattcacctgcataagccagtaaacatccctcttgaccgagatcagatacaagcatatattgagctgaattccgaggaagatttacttgatatatgctttcaaacctatcagcataattttgcttggaaacatcacatggagtagcacaaagccaaattaatgaataataatctgaatgcaacagattcttaataacagaatcaatttttactacatctttaccacaatcatcttggtaatgggatgcaataaactcaggaatatctgtatttccaagtttattgatttcaaaatcaataacatctttgggacgattctttcccagcaatgaactgtaatcatcactacgaaatccaattccagatgctaagatacgtatagcttcacgactaatagtttttacttcaactgtattcttcattttttacctctttcaaaataaaaagtaattagttagaaaaaatactctaaattaattacttggttttagttgctaattaaaatgttaatcctgttctaaacgataaaggtctctagttacgcaatcaagaactctaggatagatttgatatttaaagtcttcttcatcaatctcttgaatctcaaaaacatcatttagccagtcatcaacccaatctcctgcatcagaagatgttttattaattggagcttctgaccattcaaaatgaagttcataagctttaaagttatttttatccgcacttatagcgtactcaaaaggtacgtcaccttgactggaagagacgagttcatctgtagcaaagaaaggataaaactttttcccttcaaaatttactacatcgccttgatagtacattctattgacgttcaataataattgcttagtttgttctttcatttttcttttcttaattaatcttctaaataagaattgaccaaaatttgtccgattctaccccaacttgcagagtccaagccagtttcctgacttaagtaatcggtaattcgatcatattcttcctgttcttcttcagatagatcagtaatattccattgatctggttttttcctcatttttctattcctcatttctaataacatcttgataaatatgagccaatttctgcgggactctaataggctctgggtcaaacgtattgtttacgatctgtacagcataaacaacgcttttgaagtaattgatagtccaataagaaatattttcttttcgttcaccagtaagaacttgatacatcaattgacttctgctaaagctaattagaatatcctgcagtgcttcacaaaccgtatctaggtcatacctgatttcagaaattatcttatctgtcgattctttgtcagtttcgttaagtacaaatatgctattaatattgttagccaaagctacactcttaactaaaccagttttatatagcaaattactattgtgcatagccataaaatagctgttcatcaaaaggtagtatcctcgctgaatgtagtagaaatcatcagcaaattcgtctgatggttctaatcctaattctcgcaaagagtagaaataatttggcaaagagctaattgcttcgccaactacctgtaccttaatttgttcttcttgaatcaatttagtttgtatagatgttaaatagttcattattttacctctttttaattagaatagtgatagttgatcgtacttgcagtcagttttaggcataagattagatgtcttctcaaatctaggagaagtatctgcaacttcaaatgagggcttaggtgctagaaattcagcgatgctatctttcaaagcaggaaaacgatcatcaaaataattgaaaacttcttcttttatgtttgaaaagcataaatactcatatctagtttttcctgcgtatagttcgggctttttaataagtgagttattaaaacccaagtgcgaaacatacaattcgaatgctcttgcaaaaacttctgttggggttaataaatagtttagcccacgtttaccaacagtaatttcaccttgtaaagcacattcattcaaatagacagcaacattgctgacaatcttgttggtgaagttatcttgcaatgataaagcaatgctatcagaatgataatcaagaaaatgaccatattcatgaataaacgattgtaaaccaggctgaccatttatttctcgaaaatctaaagcaatagtattgttaaaggtggtaaacatccctaacgccttatggttttgtaattttctgaaacgaagaattggtttagctccgtcacttgctttaggtagaaaaggtaaagtagcagtaatttctggtactaatttatgaagcttggttagatcaacatcgttatcaatctcaactcctgcaagataatcagaccaagaattactaagtctttgcatttcttttaaattttcctttttaatattcctcttttgctgataaaatctcgcatgagacatacccaattgatcgtcttcatactttgcttgtaagaaaaaggaatatgtatttaataaataatgtttaactttatcaataaaagcatttctgacaataagctcttctacatcaggtttagaccaaatgtgatctttgtattccaaatagcaagcttcatcatcgggatcaaaagaaccgtactttaaagcttcatcaataagtgtgtctttttcaaaccgataagtatatttgcgatattcaggattaaataaatcacgtgtaatttcagcatatttaagtgcaacgtctctttcagtaatttgagcttttttagtgattgaactaatgtcgtcaaaagaaatttcacgtttcatttcgtcaagtagctttaccttgccaataagaatatttccgtgataaacatgtacctctctattgccagtaatcttaagttcacttaactttttagttcccatcgagtatctccaatgccatgattgagctgcatattcaatatggctatttaatggatcaacaataataaccgactttttacctttatcatttgtagctaagtaaatgtgattttcccaagattcatcagtatattttgctcttttaaagtcacaagcggaattaatcatatctaactcaaattgagtgatctgaaaatctccttcttttactgattcatctggtagtaaaactctttgcaagtttttaactgatgagtcaagctctttaataccactgataaaatcttgttcagtccaatcatcatttgctaaaccattcttgtagataaattttgcagttttattaaacatttcgtaaatggtatctttagggctaagtgcgattgtcttagtaattctacttagaccatacttttcaggcattaaatctgtaattttcttcattttttgtacctcaaaatcaaaaaaagagaataaccaatacggttattctctaactacttattaataaaattcggcaaccttaccacttggtgataagtagtgatagctttcatcccaagtatttgctatagcttttcctaaccccttgagatcaataaaatcataaatccttggggcaccatgataaattttatagttacttaaatcgacattaagactatcgtagtaccagccttcaacgatttcatggtctgcaaaggtctcaagatcatcataaatgtcaatctcttcagacgatttaatttctgaacgtgcttctttaagttcttttgccaaatcaggatcaaacgttcttaattcatctaaatccttgtattgggtgtaatattcaaatttttccataattaagctcctataatacttaaacattacaaattagaaatgatacggtcaacttcatttggctcgacttcgatagcaatttctttgccatccttgtcgtacaaagtaaaactttgtgagccaaaattgaattattgactttttctaataattaatgaactttatttgcaacagagtagttacgtaattcttctaagcctgaaaaatcgcctttcaggacctttttaaggtcaaaggttaattcttctggttcgtagaaaactccataccagttatgagaattatcgtctcttccaaagaaattgaagataacatcattgttaaaaggcaaaatgtcaaaatgcttgaaaagctttttgacaattaccttgttgtatagggtcctatattgatctacgtaacgttggtcaaagccttcttcgttaaacgcagtgaagtctaaatacttcacatcgtttttatcaagaaaactaagcgtgccacgaactgttctttgtcttttcatttgctaatacctctttttactttcttttcatgactgaattacaggttagcaataaaactattagcttcatcttcatcaagatccgttgcaagctcgttgccatctgaatcataaagatcaaatgtttcagagcaacgattaaactcttgattttcactaaatgatccctgttcaattgcatcttgaacaatatcatctactgaagaaaagttttctgttgaattgctttgatctacttcatgactagcaaagtcagtgaagtcccaacgtgcgttaattctgccaccatctgccaaaaattctttaattgtcattgttaatacctcttttaactttcattcatagctgaattacagattagtaatgaaattagttgaatgccattcatcgcaattctttaaaacatacaacttaaaataactgttacataaaaacttttttccccgtatttttacctttaatcaacacaaatcgagctgaatattactcttcaatacagctggactgtacttgcttggcacagccgactgaacatccacacaatcagatgcaacatcgtcagtgcagattttggccaactttgcacaatatccagaagcttcaggatcaagctcatatggtttaagctctgccattgcctgcatttctgatttattcagtgtatgcaagtaacattcagggtccattccatcaccaagcatgattaagccatactcgcttccaaaatctttcatatgagctaatccttcttcgggatcagtagaagaccatacggaagtgattcgacttttgtgccaatcttcattgtttctatcaagctgaatatctcttttcaaatcagccaaataagccttgatatcaactaagataaagctcatttcactattctttgggaaagggatacttagcagtttttctttagaaactgtatgtgtaagtttttgcacttttcattaccttcttttttcttaattcttttgtgaacagatctgctaaagcctgtctgtcacaaaaatctaattttcttaacattttatttacctcacttactcattaatttgcatgacctaaaatcatgtcaatttcttttttgtgtgctgaagggtcattgcgatgaatgcgtaaataatcgcaaagctgcttgctattttcaggatgaaaaacatcaaagtcagagacttcgacatcattgtcaatctgaatcacatcagaagcttcacaataattcaccggtggccaaccaggttcaactaggtagcccagcatgcaatcaatatcttcaggattactgcttgctaaataggctttcaaatctgaataattatgaaatctgtgaggatcactgtttcgattcatattgagatatgccaagtaaaaagcagtggtaatagtagctctttccaacgtgttatcgttaggatctaggccataaaccgtaaactttttacccactaagccgaaatcgacagcttcctgtaagattactttttcttccattttgtttctccttcaaaacaaaaagagaccaatcatcttagactgctctcctcaattacttattaacttcaacaacaaattattaatgataactaacttatcaataatcactcctttctacatttgcttactcatcaacatgccgacaattaactcgcattaatcatctcctttctatttttcatatcaaaaaggaacattgaaattgttcaatgctcctttattacttatcagtttaatttttttacgcatgacttatcaaaagataaatcaagacctacttaagacatactactgcttcaatggaagcaataaaactaaataaaccacctaatacgtcaaatgtgacgctgttacaactttttaaagctgtctgaaaaaataaaaatttcaataatgatttacaagttaattatagcatacagatactagtttcaggacaaaaaaatagcatttcctactgtggagaaaatattccaacaaatagaaaacgctagataattagattatgttatgccattaaattacttaaacaagcctttgattgacttcaaaaggttgacaacatattcgatttgaaccttttcagtactaagcttttgatgattattaataagatcattctcaaatgcctgagttgcatactgaatgaaatagtagcaagctatacaaattatcaaataacccaaatcagaataatccgagttaacgactgcatttgccaatgctacaccaccagtaattaaatccagtagaagcgctaaagccaacaaaaacagcgcaaaacgctcgatttcaaaaagatcatcagtgatgagttgttcacgttgcttcatgcgcaatcctttttgatactgaactctggtcaacctttttttagtattcatagtttttacctccgtatgaattatttaattctttaggaaagctactacttgttgttaagttttggtaatgcccaaagctattattcaataagtagtcacagaccttcttttcataaacaatcgcactaatagatagcttcatcttcaatgatgtctaaagaaattggattgttcttgctccaagcttcattatcatcataaagagacaaacagtttattttatgaaatctcaataaactattagagttttctttgacaagcacaggaatttctctcttaatgcggtaaatatgtttaaactttactaaagcctctgatacagttaaaagcctactatcctttttatcatgttgaatatcaacatcaacaattaaagggttttgcttaaaaccaaagaacttacttacttcctttggtaaaaaaatcacggaaatatcagagatacccccaatagaattcaccacttgcattacttacatacaatggcaatttaccttgattaggataactagctattcctaagtatttatcaatttcgtcaatgatgcttttcaatttcattgatggaaagttgctcaaacgatccttcatatcattaaattcctttatttgggcaatcaatggaataatttgctcacgatcccaatttggattaacagtttgaatcaatttaaccaaagtctcttgactcaatacccgatcaagcttgttatctcgtataaatctcagagtagcaagagtagattgagttcttcctgcattaataccatctaaataaagacgattttctttgttcatcattttctcctttaaacacccggatttaaaattgaagtgcaacactaagtgttaaacaaaaaggccatgaagacctaaacttgaagtgacgaaaaatcaagaaaggaagatcttcatgaccaattcaaattctagcatttctaagcactatcatcaattaaccagcgtacaacgtggacaaattcaagcaatgctggattccggcataacttcccgtactgttatcgctcaagaagttggctgccataagtcgacaatcagtcgcgaaatcaaacgcggaagcgtcctgcaaagagacagcagctatttattgtatgagcactattacgctgatactgcacagatttattatgagaagcgtcgcaaaaactgctatcagcgcaatccattgaagcattatgctgtctttttgagaatgctctccagacgctttaaagctaaatttgatgccaccagcatcgatgagttcgttggtgaattcaaaaggactatgccaggctacccttgtcccagcacaccaaccgtctatcgctatattgatcagggcttgctggacataagcaatattgatctgcctatgaagctcaaaagacgcaggaacaagcgtcatcacagccatggcggtcacgctttgcacaagaagcatcttggcaattccattgaacagcgtcctaaggaggttgaagacagaaaagctccgctgcactgggaaggagatctggttaaaggcgtcagacgcaagaatcagcctgctttaatgactttgactgaaagaaccacacgctttgaagtagttatcaagattcctgactatcgggcaagcacatgccaaaggctgcttcaaaaggagattgacagacatcctgcctggtttaaatcaatcacgtttgacaatggctctgagtttgcggatatgaccaagatcaagggctgccagatttactttgctcacccatattctccatgggaaaggggcaccaatgagaactgcaatggtcttttgcgtcaattcttccctaagggcaagagcatgaaagacaagtcaaaagcttatgttcaacaggcaactgatgccattaaccacaaatatcgccgaatcctccaatatcacacagcagaggaactcttcaagcaatatatctcttcataacctaactgttgcacttaatttgacaattcaggtctcctttaaacaaaaaataatacttatattttgcaaaatacaagtattacttttcctaataagtttaaccactaagtagtcatatactctaatacatgtctcttgtagtctttctttatacaattaagtactttagcccaaaatacccgtaacttcatatctttgtttgtcgttatcaatttgataaacgtaagtaaatccatcaaaagttcgatataccttatcaggagtgtcactgtaagtataagtttgaacagtaaacatcttaccatctttcattggcttattagtgtctcttgatggaacccagcgctttttgccgactttataccaagtttgtcctgctatagtaattacttgatagactttaaaagtaccaccatttttagtttcaataatgctatcaactctaaatgatggaacaatatgcagaactgcatgaccgccaatatcaattttgacagtaaacatggcattcttcacatgtgaacgagcttgattttttctactgtcttagcagtacgaacgcttgcttgtactggcttagagttgcttgcaatcaagccacttagcatgaataaacctgctaaagcaacaacaataacgacatttttaatgttaatttttctcatttttatacctctcttagcaatctgttttactcattcgtttatcgtttaagcgtaataataaactgattttttagcgggtaccatattgtaagccttactcatgtactcgcttaccatttcatcatcagtagttaaaccagccacataacgagatttacaccaatcatcttcattagaaaaaccagagctattacatggcaaaattgtaacggctgtaccatataaaatgttttcgaaaacatcagtaaatgtttcaccgtcgaaattactctgataatcatctttaaacttttcatcagcattaactggttcttcatcagtaaagtcgtaataccaaacgtatgctaattcaccttgagaaaaaccagtaactcgccaaaaatggtattttgtgtcttcaaatgcgttattaaagtaatcaaagacaatatattccagatcagaccaattaattagcgaaaatgaagatggaaagtcgttaataataccttcgtctccagtttctaattcatttaagaaatcttgctgagtacttccatcgtactgatgctcagtaaaatactcatcgaattcatcttggatttttattggatttaagccatgattagcacgaatttgattacacaaattcattttttgacggaaattaagcttcttaaacacttgaaataggtcaacaacctgctgtgtatcaagtgctccaaagtgtgtagcttcaccagcaataaaatgaaagccgaattcctcccaattagctttgctaatttgcaaagtatcaaagtcggttggtaatactttcataaattgattactttttgcgtttacataaactgtcattttaataattcctttcattaatttcttatcttgtgctgtcaacttgagctagtctttgtttaacttgcctaatcaagtcattcataggaactggcttaacagttgtttctttttcctttttttcaactttatgcggttgtttttctgaagaagcggccttttttcgatattcttctctagttgtttttttagcgtaagaaaactctctttgagatttcttaggttgattaactggagcagaagataaatcatacaaagtatgaatttcaccattactatcagctaagatcgtatcagcattaaactttgaaatatttgattcttcaatgttggtttcctgcttactattttctttaatagtgttattcttagcttcctttttaggggatgccttagtctgaaacaaggttaaatactgagctttcaaaatatccttacgaacattcattggaattgatgtttggttcaattcttttgccatttcgacaggatcttgttttgaagaagcagatttaggttctgaaaaagctaatttcagttttttccaaaccaatttaacgatttgcttatgcttgctatcaaagcgataaactaagtaagcaacaaccataaaacagaataacttaaacattttaaatacctcttaaaaaacaaaaagagaccaatcatcttagattgctctcctcaattacttattaacttcaacaacaaattattaatgataactaacttaccaataatcactcctttctacatttgcttactcatcaacatgccgacaattaactcgcattaatcatctcctttctatttttcatatcaaaaaggaacattgaaattgttcaatgttcctttattacttatcagtttaaattttttacgcatgacttatcaaaagataaatcaagacctacttaagacatactactgcttcaatggaagcaataaaactaaataaaccacctaatacgtcaaatgtgacgctgttacaactttaaaaagctgtctgaaaaaataaaaatttcaataatgatttacaagttaattatagcatgtaacaccattatttagtaactaacgattttaattttcaaaaaaggaaagggagactgtaaaatagtttgtgtaaggatgaatgattccttaaatttatttctttaaacattagaaaaaggagttcctttctcgtatgattggtttgaacaaaaaaaacacatacagaaagaagaactccttcatgaatgattttaccaaagattttgctcaagctctattcaatccagacaaaataaatgatttattgcgcaaagaactacaacaggctgttaataacttgctagaagctgaattgactgcctttctgggctatgatccctatgccagaaatggctggaatactggcaactctagaaatggtgcttatttccgcaaagttgatacgcaatttggcccaattgaagtgcaagtgcctcgggatcgcaacggtcaatttcatcagcacacgctgcctgactacaagcagcactcggatatcttggaaagcatgattatcaagctttactccaagggcgtgaccaccagggaaatagccgatctaattgaaaagatgtatggcagccattacagtccagctcaggtatcaaatatttccaagcagatgattccaaaggttgaggcttaccacaaacgcaagctaagcgacaagtttttctgcgtctatttggatgcgacataccttcctttgcgccgagaaacgtttgagcgtgaagcagtctatattgccattggcatcaagcctaatggacataaggaagtcattgactactgcattgctcctagtgagaacattgaagtctggacagagatgcttcaaaacatgaagtccagaggcttgaagcaagttgaactctttctttctgatggtgttgttggcatgaaaacagccttagccaggacttatcctaaagctcattttcaacgctgtttggttcatgtcatgcgcaatatctgcgctaaagtacgcgtcgacgatcgtgaaaagatcatgaacgaattcaaacaggtgcatcaacagacaaacaaagaagaagccacagctgtcctgcatgacttctataccaaatggggcaaggtttacagccatgttatcagaagcttgaaagacatagaaccagatctgctggtcttttataactatcccaagcagatcagagcttcaatttattcgactaacatgattgaatcatttaacaatgtgatcaagcgcaaagctaagcctaaggcagagtttccaactgaacagtcgcttgatgcttttattggtattcaggcaatgagctacaatgaccgttatttcaatcgaattcataaaggctttggtcaggttcaggacaccttagaatcctactttgattaaataaataattaaaaaatcaatttacgagaaagaactatttacacaaaagatttgacagtttctgttttctagttcttgcttaaatttactattacttaatagtcctaatttggtttctaaattatttttagctttgaattcatcccaatcgtattcaaatgtatcaagctttccatcttcccgaaattcgttacacaatgactttacatcaataacgaattttcttttgccaactaatacattacttttaatcagcctattcaaaacttgaactaactcttcctcatctaagcggaaatatttatcctgaatagttttaatgtaactggcaatcatgtagcctgaattagctttttgtgctaaatcatttgctttatcagcactaagtatcttacgcattttattctttaataccccattctacacacaacattgcatcccttttaagctcacaatctttatactttgcaagaatctttcttgaatcgaagccatgagacacaattacagcgtaattatgtacagtcttatgaacttcaatctcattttccttaaagccttctagtgttaagtcttcaacaaaacggtccaaatccttggaactatcatagtcaaataaccatttatgttcagcggcattttgtggttgcattgccaaacttgtaactttactttctaatttggttgcggaaaaagtaggatgatctagcaaataatgttgcaagtccttaattgttgattcattgtttcgttcgttaacggaaatataaaagcggcttagttcacccttaacacctctagcaacaaaggcatcaaattttccttttagctcatcaagacttttatcagttaaaaaagaaatctttctttgcttaaaatctttaacatccttattgtctttatttctggaaacaaaaaatacacctttcatgatttttcccccgtacatatcgagattttatgaatacagcttctcatttgttgcctcgctttcagctacctttgataaatatgcaagaatatttttttcatcatacttgtgcattctttttatgattttgttgaaacaccatgaggcggcctttaagcgagtttctgaatcaagatttgaatatttctcagagccttctacaaaaatgtcagtgcttcaaagtattcttcaatctctttattttctttctttttcttattgtttttctcattgatgaatatattattgaacgcgtggtgctagttaaatcgttctagacaataagccaaattataagctaaaattacaatttccaaccggctttgaaagcctatcagactacgtgctcgattgttctcggcattgtaataggtcagaagcgaaaagtcgctttcaattgttctgcgaatagccatcaattgatgatcattgtgctttttagctcctgtcatatttttacgatatggtgtccaaagttcataacccatttgttttagctgttgatgcagttctttgcctaaatagccttcgtcgccaagaagatagtaattagatggatgggcattttccagcagttcaactgtctccttggcatcatgaactgatgcttttgttacgacataatcaagaatgtaaccgtcatcgctaacaatggcatgaactttgaaaccatagaagtaaattttcttggtggccttataaccaatgttggcataaccgcgaaaaattttagcacgatagttgcgaattggttggcaaacaggtaccggaaagctgtcaatgatcaagaaatgtccattcaggtcaacctttttattcatttcttgccgtatctgataaatcaattgcaatagctgacgtgaacgccgattaaaacgtgagtgtgataaacaattgaaacattcacagaatcttctttgtgattcaattcctgtcttagcttgccagataagtaaagccaaaatcagactgtccgtagttttaatttgatcaatatttcgccgatgagtaaactcagccggtgcatacaaacgataccagtgccgacaaattatcactaaatctttaaaactaacttgtaaatggtggctaaaacgcttaagcttaaggcagttcaatcagatcagactcttttctattattactatttacaagtcgagtctaacaagattggacttttttattaactaaaacgatttaactagcaccacgcgtattattgaatatatttgtcatttgaattactccttttttattaccgtcaaagcacaaatgcctttcactatctttttattagctcatttagaaacattggcaaagtagttggaactacaaacttgaccatgacaaatgtcgttaagcaaattagtgatattgtaactacccatctaaagaaattttcacgactcggatcaaagacgaatatatagagcaaagtcataatgagacaagctaaaaatcctattaaaaccattatcaattgcataaatgcaattttgcctgttactttgccaaaatctattgttttactaagatcgtaggcaaaattaccaactagcatggttacaattgttgctagaaatattatgatttttacatatttactatcattcattttttgtctttctctttctctttatttggattgttatgataacgtaaatctttccttaaatgtcatcatcattacgctcttttttttcgttatgtaatataactttagggcataactcctcaaagtcatatctgctccttatttggtaacaagattcggttgcatggtatctgttttcaattttatggtcgtctgaaatcttagtagcataaatctgtggaaacaggttcatattaatgctacctaaaccattgtggttacgttctttcaattgttgtcctgtagtgattttggcatttactagggatgcaaaaaaactttttgtaccaaaatctaagaagttgtctaacagttttgaaattttatcgtagtcaacattgtctccaaagtcataagccatatcggttaaatctaacttggcatcacaatattcattacagatagtcagtaaattaatcattagtagcaagcttggcaaaaacctaattccagaataaaagctctgcgcgccaaatacattctgaataccgcatttaaacggatcgaccttatggtttaattcgctaaaagagaacatacagctatcggtgtcaggataatccttgtgacgtacaactcctttgttgtagaaatcaaaactagcagaactgttatcattattgacttcaagcgggactatcaccttacgggtaaaatgagctggcatcaaattttctggatgaaactcatatttttctactacctcaagttgatattgcatatttgcttttagccttggaagcggcaatagaatgccataaaatctcttatttctatccttgatatatggaaagatcatagacttgttaggcactggcgaaccaaatttaaaatcattgattgaatagtccatcagctttctagcattgctgtcaaaaagtcttacatcaacattcattttccaactcttaggctcattaaatacaatttgtggctgtaagctttcaacatctaaaatttcttttggaatctcctgttctgggtgtgctttcaaataagcactagctttagtcattttttctaaatcaatttcttcaaaaaaattctcatcaattaccattgactgaatttttggagtgtaataaaaaacgttaggcttatcaaatgctactggcatatcagtttgttcatgcatatgcctttgaattgcttttaaaaagccgagtccaaactcgtctgcgctaagtgttttagtagtcatctatcttattccttctctttaattgtgaactgtgaatttttgcagttctctatttactttctttttaagctcttttttttcatgttttttcagccattgctgattgataacgggcttgccatttttatcgattctaggcgtaatccctccattatttcgaatcaggatatactcaacgcctgttttttcgtcaaccatgatcgcagaccctagattaagttcctcatttaatgtagtaatattctcacctttaacattatcagcactagcacttttgctctcttcgcaagccgataaggtcaacattgccaaaagtatggtagtcgtagccaaaagattcttcttagtaaaaaccactatagacacttcctttgcgataagttactgtttctcttccaaactcaaagaatttggaagtttagcaattgcttcttctaaggggatattatgtggaataccatatagaccaatgatgccatacctattacgcaagtaatgtttgtcttctgttgttaatgaaaaatgttccaatacatcattaacaatctcattaagtttgtttacgcctgttttggtgtaataattattaggtgagctaatagcaataaacattccattatcgaatctaatagttaaatcatgagttcttacttctactacacttttgtcatttttactaattaattttcttattaccatcatttgtatctttcttaatttaaactgttccaactttcaactaatttctttcgttgctttggcaatattttggcaaaataaaacaattctcttaaagctctaggcaaagcaattaattcatcatatgtgggagtgcggttagtgtggcatctgtacgtcaatagctcattagtcatgcgcaacatggaatttatatctaagctcatgcacgcttgtcgttgatacaggtctcgccataatgatttatcgttagacatgttgtgcctgtaatatgggatctctaatttagtaatcacatctcgttcattgactcgccatagacgataaatagcatatggcactagcaaatctaatttagcagtagcaggacgaatgcattgaatttgattgtctttatctaaaaagtacaaacctgtttcaggaaatacgattttttctacgttctcaagataaccctgttttgtcaatatttacgttggcaaacgccttatagtattgtcgtatttgctcaggcagtcttttcaaagtatctaaatccgatttgatttcccacacagtagaattattatcgtttgcttgatctaaagtaatgaagtcacagattgccttgcctaatctccattcctttaaagcacctactcgatgatctttcaatttaggcaaaaccaactgattgaatagttcatttttgtagaaatattcattgcggtgattttctgccatataagaatagattttgctaatgctttcaaagtagctattatgcacattaaggtctacatatggatttttcataatttctaaattactgggactaaaatgttctaaggactttaacagttgattactaaagcacctattaaaccaaagatcattgtcttttttcctagtcatttaatttttctttcctatattaatgttgtgcaatgtagttaatcaccttttgagcgattgaaccgtaatttaccaagaagtagcaactagtcactgtcatagctaaagtcaaagcaatgtaaccttgtaacaatctactttccagaactaatttctttgatcttgattcagtaagttctgcttggggattattgatctgttttctaattaagtaattggcaaccaagcctaaagcaattaagactactgtcaccgaaacaattaagaagaattgcaattctgcattgctgtactgagcatttaagtgttctagtttccaatcaacatacattatttcttatcctccatatatttttttatgacctgatcggcttctctgcttgttcccattaccaataagttgtctccattattggtagttaccgtatatctttgttctctgggaatgtattgcttcttatctactacctttgtagcaattacttcatcaaatttaagcaaatctctggtactattaattttaattgcaccgtcttttttgatgtgatacagttcgtgacttagtgcccttgtattaactgtgtatgcagttggaactacatattcaattgtgatcttgccgtaattacgcagaaattcctcaatttttttgttattcattgcttttttcctctttcaacaaccaaaataaggctcctggcgttaagatcaagccactggtagaaacgattgccatcagcttaaccatttttatgacgaagcgatcagacgctatcaaagtaacaacagtacaaaaaactgcgacaactaacaaaattccaattacaaccagtatttttttaattgccctgtcagtgtatttgttcattctgatattcctttcaaaagacacgctgaagtgccattcttggcagacttaaaaatgcttgattagctcaaacacgattaaccaaaagatcaatccaaaaccaatggaagctccgaaagtttcaattacatacagaacaaagtcattttctgccatcttgcctgttttgcttaaagattgttttgcctttaattccgttcgggtcaaaccgccaccacgtttaatttttgatctatttttttctggcctgatagcatttagtcttacttgcaagttaattttcttctgttcttgttttggcatgattatttcctatcttttctagtgtgcagtcgtctgtctaggatcagcaattcctgttacttcttccattcctcgtcttgtgacaacaatcgtattgccaaacttacgccaactacccctaggccatttctctgggtgaaaattgatactagcacgtacataatcagggtttttatgccaaatcatagacgcatctttggcgctcataatttctggattgtgtaagttaatcatgctatcgctcactttccaaccttattttattaaatttaaaatgcaatttctggttttctccagacgcttagtacatgtatttttgtggactattgaaccacgctaaatgattcttgcttaatcgctcatctaggctcaagtctttatcattcatctcatagctagtcttattatcttgaattccgtagatttcagtagataccagtcgattgtctttcatttgctcctcaatgcttttatgatggtgcgttttaaacataatcgtcacacttttccttcatatattatttaccgtgtagtttctaccgtgtgaaagtacagtactgtcttatcatcttttttttttacgctaacgacataaccaacagtaaatctaccagtagcaactctatacttgcgatcaatttcttcaaaagcataccaatgctttggctcaaaaatatcggtcttgggtaaattgattggttgcagttgaccattattttcacccattggagggatgtcgctgtgaatcacactatcaaagtgatccatgtaaacctgcactactgcatctactccgataatcggataaactgcaatatcggttagttcaatatcttgtaagtcttttggtacccctccacccaatttgtttgcttctttttgtgctttgagttgaaattcttctagtcctctattccctacctctttaagcaagactttgcgctgatttaagaaccgagtaaacattggttgcaatcgcttaataagttctactcttgattcagatggattgataactccttctggtttgatcttgttatattgtttggtaaaatcttctgtataaaagatcgaccgactaagaccatcaaagatgtaagccatagccctatccgtatcatgactatatttcggatagtctaaagcaagataatacttatcaccatctacataaaatgggtggcaagctactcgatcccaattaccaaaaaggttcggaaaagtagctaatactggatggtccgcaaaggtaatttcactcataatcccgcaactcctaacttcttagtccctaaaacgacataacctggcatctgcttaaaattggttaaataagtgattaagcagtggatcttgcgaccagtgtattccttggtcattggatcgtattcctccagaataagcaattcgcctacttggtagttacgatcattctttctaatctcaaaatttttagaaccgttagcttgtgcttcgtagtagctaggaaagatttttactcgatgttctttaatttcatacgctccgtctgttgtaaatgctttcatttaattttttctttctatttcttgttgttaaaacaatcatagttaatttaaaatgcgatttctggttttctctaatttgtgttaaatgctactttatactatgaaacaaccgctgttttctaacgtaaatgcatagaaaaaaacctattaaatacggtttgttgataccatatttaataggtttctatttggttaagccttacttttgaactgaatttagtcttctctaattacgtgtttcaacaacaaatctgataccctgataacctgagtaattgtaattgtaccaagagagtccaggcttcgtttcccaaacagcttttgttccaattgcggttcttcttggatttaacaaactatctctgtgtgcccaatttgcactagcatcatgatagataaatgtatctaacaaatcttttgctacactttgtggcgttgaactagaatttgccatagccatagctaattcttctatatgcattgtggtctcaccatttggacgctcatgagaaaacttttgtaaaatttcttgacctcgtgtatcggcataagattgtagctcagagtttgtttgcaaaggttgtaatcctttggaagtacggagttcgtttaattgcttgataaattgcgttgatacttcttgtgcaaattgaggtgtaacaacattgctcaatgatgagctagattgtgtgttgtcttctttagcaggaacatttgaactgtttttctgggtatcttgcttttgattactattattagtagaagtaacggatgaattttcagccgtatcagcatttttagtttctacattattcgtttttacaccatatttatctgtatcagtagcaggcaaccatttatttttacccactttgtaccaagctttaccattaacattttcttttgcgtaaacttttacagattgtccaatcccaatgtactcaccagtaggtgattgattaggggctttataaatttcacccaatccattttctgtaatttttgcagtgaacaaatagtttgattttgtgttttgtacatttgcaagcttgatatagcgatgattaccaatgtataaatattttctaccgtgaatttttttagtatgaaaagcttttacacttctgcctttcttgagtgttcttgctcctttaatacgcttgcctttgtagttgtaaacataagcattgtgtgtaagccttacacttctagtgcttgcttctactacattggcttgttcattgccagcaacaactgtagctgaaagcaatagagctgatgaaagcgtaatagtcgataaaactttagtgatcttctttttttgtaacatgttagttacctcctatatttcttatttcaatttctaaattaataatacatgatggaaaaatgcatttcataaaaactctacgattttttaaaaaagttggatttttttgaaatcagaagggaccccccctaaaaatcaaaagtagatttatgataagaatacagatttcgggggttatctgtgatttataatccaacaaagaaggagataaaatatggaaaaaagcaatggttataaagaccatacagatctcaagagtcgtaagggaattaaaattctctccgctttaagcatggctttacctatctttatgcaatcgggacaacatatttttgccgatgatttaaagaaatataaatcaatcccagcaaatattacagttgccaatcgcccaactgaacctggttctttaggctgggctactgtggttgcaaataatggtgctagagatcaatacgcggggaactgggttgacacagatggtaatgtatattactgtcttgatcctaacttagcggctccagataaaggaagcaaatctacacacaaagataatgctagtggagcagtacgtgctgtcttaagagcaggctatccatctcattcagcggccgaactgggtgtaggtaatcataaatatatggctatgtttgctacccagctagctgtatggcatgaaggtcaaagtacaaaatcgattacgatccataatgccacagtaaaaaagctttatgaaaagattttggccgatgccaaaaaacaaacaggttctggacttactaaacttaagatcacagctactaacgttgataaagaaaaaggttcagctactttaactattaataagacagaagacttagataaagtaaaagataatgttactatccatctaactaatcttaaggctacacaggatggaaaagcagttacaacaactgcaaaagctggtactccaattcaagttcagttagaggataaatctaaaaatgggtctatgtccgctaccgccaattcatataccacagagacacctatttactacactccaggtaaacaacgtggtgtaacgatgattaaagttcacaaaggaactgttaaagatgattggagcttcacatctaccccaaagcctccaacgccagaacattctgagatcaaggcaatgtttgacttgaagaaaaacgatgatgagggcgatcaggtcgatcaggccaaatttgacgtttacgagtctgattccaactggtctcaaggcaagttcatcggtaccattactaccaacaaaaacggcgtagccagatcgggcgagcttgatcctggctactatattgcaatcgaacgtagcacgggcaaaaatctggacattaacaagactccagtccacattgacttaaccgaagccaacttgaaggaaaacgccaaggtaacccatgtcaagactccagacggcaagccttacgacttgtatcatctggatgtggacggcccgatcaacaaccacaagaagcccaagatcacttctaaattgaccaatctggaagacaatacccagtttgctcagccgatccacggcccagtagccctgaacgagcatctttacttctcccacctggtggggacggtaacctacaatgttcgtgcctggctgatggacaagacgacgggccagccagtaacgatcaatggccaaaagatcgaagcatccaagacgattgggtcaagaaacaatgacactaatgatgatggtatcgaagaccagactgatttacagttaaagatcccagacgcatcaagtttggcaggtcatgacattgtggcctactcggaaattgcccgtagcgataagccagaccactggacggctttgcacgaggacatcaacgacaaacaggaaacggtccacttctctaagccatcgattcataccaacgcggtcaacgcagaaaccaacggcaagaaattacagccgaccgatggcgagaccatcaacgatacggtaacctacaaggagctgatccctggcaagacctatactttaaagggaattgtgatggacaaggaaactggcaaggccgtcttgaacaatggccaaaaggtcgaatttaccaagacctttacggctaatgacgctaatggcgaagtcactgcatcagttaaatttgacgctcaccactaccgcaaccaccgtttggtagtctttgaaagtctttactacaccgactacctattaacggatcaccgcgacattaatgatgtcaaccaatcgcttgacgtaaccaatccgcaactgcatactaccttaagcgacaacacgcagaagctggtatcgcctaaggccctgaatacggttgaggatgtaatccgctacaccgatttgattcctggccaaacttattcagtcagaggtaaactgatcgaccaggtaacaggtgcccctgtcatgaagcgcggggttcctgtcatggccacggctacctttaagccaaacatggctaacggcacggtaactttaacctttgtttttgacggtacccaatatactggtcaccacctgactgcctttgagagcttgtacacgaacggcagaattttggttgagcatgccaacctcgatgatgcatcacagaccatctcggttgacaacaagcatgacaatgtaaccccaaccccaattcctgttccgacaccaaccccaactccaggcggtggcggcagtaccattattaataacaataataataacaacaataataattcatcaaataacggaaacaataataacgggaacaacggaaacaactcatccaacaatggatcgaacaattccgctaacaatggatcaaacaactctggcaacaacggtgccaataacggaaacaatggctccaataatgcagggaacaatggcaacaacggctacaatggttacaacaatgcaggaagcaacggtgccaacaacggcaataatggcgcaaacaaccagcaggctgttgccaacaatggcaatagccatgccaacgttgtccgtcatgcagttcggactagcaagccttgtcaaaacaagcgagtagctcgtgccaacaatgcttgtcaaaacaagcaagtggctcgtcctaacactgcagtagttaagactccagcccgtcagactgcacctgcatctggctcagtcttgccaactgcttcaatggttgcccagccagccgaaaagacagcttccgcaagccaaattttgccagcacaatcgcctgcttcatcaggcacattgccacaaacaggctcgggcaaggacactatgcttcaaagcttgggcgctgtaaccttggcaagtgcaatcggcacctttgtctacttcaccagacgcaagcagacaacaggcatggaataaggcgaaaagaaaaagctaagcaaaaacttagcttttttcttttgtcttttttaattactatccttcttagcattttatgtcgattctatcgaagataattgtccaagtaaaaaaagtagaactactgaaaaatcagggttctactttttctattcttatataaatttagtgatgcaataatttaattaaaccaataacagctaatcctgcaacagctgtgccaactaagcacaacactttttgtcttcgtgcgcctactttgggtaaaactactacatcattattatcgctataatcataattctccatttgtttttaccgcacaataatagatctatcattctttttcatcgttagggtccgcatttttctctaaatatacggttttctctaaaatagtaaacacatacttaggtgttttagaatatttatcatccataatttcgattgatgaaatatgcccttttttgtaatttaccttatttcctttttgtttaacatactttaccaaaggcttaacggcttggacataggtatcaaaaatattagcatccaatttaactgccctaccatctttagcaaaagtgattttcgttacttcgtaaacttttccttccctcatttgttacctttcattgctccataacaattttcagttttgacaacttaagtatgtatcccctttgcaaaaaagtccttgttattccattttgatagtttctcctagtagcaaatgtagattacagcactaattaccacaacataagccagcatcattgaaactaagctcgctttaccttttaaaaacattgtaccaattccaaatccagttgctacaatcaaagaaataactaaaaaaatcagcattaacttattcctccctattttgcttggattaagcataatttaaagtttttttgagtaaaatgctgattctttctagttctaagaaaatacgcaaaaagaaatagcgtccattgctgaacgctatttctttttagaaaaatttttaattaaataatttaacacgtctcttccgaggcatgaatagctcgaatatgattaaagcattactcatgttatcaaagaattaccattttgtcaatgctcaaatcccttgagccagctgaagttacaattactaacctactcatttttttgctctagtatcacaaataacaagccaatatttaataggttagatattgaaaaaactgcattagagaattggaatacgtctttgattggatcaaaaccaagtatttgcttgatagatattccgaagacccctgcaactagataacaaactaatgtgaggcttataactgatatgtctgccattacataatttgttaccatctttttgaaatttgccttttgtgttgcaaacaataaataacatccagtaattaatagcattactgacaggagtcccaatgtaattctagttatattaaacattactggcaaaacattttttgataatagatctacaaacattttttacctcttattttctaaaatttagctttctgtttttagtaagactaagaaatagtgaatcattaataggttcatcgtgaagaacgtgaatccgcattgcttgtttacaaatcttttctattacagcaggagataagccatctgttgcttttattacgacagtacttggctcataatcaacttgccagcgttgcatgaagtacgtgatgaacttactacgatcaatactttcacttggataacgtagaactaaatcaaaccttcgtttaattgcaggatctataattgaatccagattagttgcaccaatgatataactacttgtatttagattatccatccctttaaggattgtgttgacaatttcgttgtattcacggtcagccccttgtgaagctaatgttcttcttgaaactagcgcatcaaactcatcaaaaaagtaaactcctggtttgcctgggatttcttcttcaaaaaaatacgttatcatgttacctgtctgccccatttgactactaattaacctagcaaagttaatctctttaagtggcaagcttaattcactcgctaacaccttcgcagtcagtgttttcccagtaccaggtttgcctagcaacaagattgtattagtataagtcaatccatacttagctaagacatccctcttctgtcgttctaagacaacttctcgcagttgatctttcaattctttaggaagaatcaaatcatcaaagcttaagctaggcttttcatacttaattaatccctcatgagtttcattattaacctgcacatcattgagccagtccataatttgtttagcttcgtaggaatgttttctctttttaagattattagcaatgcttattgctacttgccgaaaatggtctttatcgccgtatattgaatcctgaataagatccattgcttgtttagtcgttggcatagacttattgtatttcctttcatttttgctgttgcaactatcatagctaaattgaaaagcaatttctggttttctctaattgattaattattttcaagtactagtattttgaatagttggtatttaaaaaggcattccgtaaagggatgcctttattgttgtttttgaatttattattgattttcattgtgtttaaaaaaggaaactacaaatatgcctaataagctgattaaaccaatgaatttcattcccccacttattagggtaagcgattgtgtaacaggtatatcgttgattgctttaaccagcatgtccaagataatacttgctatcgtgcaaattaaccaaatactaattgcaattttgcattgcataatgtacttcttatctattttgtttaatgtaagtatgctatatatcttacgagccatcataatgcaaatagctattgctactgtcataaacaaagctaaagtaatgttaatcatcgtctagttcctttcatctattctttgtatcgctaattagtagcttatcattttcacagtgccatttctgtttttttgagaaattctgcaactgcttttggaatctcttatactaatggaaaaatcagaaaggatttaggcaatgactaattttatcactcgcttgttccaacaagttaaaggcaaaggcagacctgcatctttagaatatgatagctacccttttcccaccttgtgcttaggcatttcaaaaaagtctgaggaagtaaatcaaccgattaagatttatctccctaatattcggactaaacgtgctagacaaaatcaagttatctttgctaatgtccccagcgaaaccgaaacacgcttgttgcgcaaatttatcaagcaagatattaagtatcaagaatactttcattctaattattatcttttaactcacaaacaggaatggaacaacaagattgggtttcaaaccaactttattagtggtgtaaccgtaattagtcccgatcacagtatgactatgcaga

SEQ ID NO: 15 - DNA, 17412 bp, Lactobacillus crispatus
  source 1..17412: mol_type = genomic DNA
ctgatttcagaatagctcatgtggtcttgagtatggagcttccacgcaaaatcaatttgttctgaggtgtactttcgaggcataccatcatggaagttaggattattggcttttgcccatgccttgccttcctgggttcggttcacgataagatcacgttcaaattctgcaaatgcactgaatacagtgaagattagacggccacttggtgaattatcaatcgtaccaatatttaagacgcgtagaatgattccctcagcatttaattgtttaacaatgttcaatgcgtcctgagtattacgtgctagtcgatctaatttggtgacaattagggtatcaccactaccaatttgagccatcaatttatcgaattctggtcgatttgctgtggtgcctgtgtatttatccttaaagattttggtcgctcctgcctgttttaggtcttcaacttgagttgcatagtcctgctgagtagttgaaacacgagcatagccataaatggtatttgtcatatatttcctttcaattatgaatacaagttatgaatatggcttatgccctatcttagaagattctacttttgtattcaagactttcaacttttgattacaaatagagtagagggagttttataactcgcccctctcattgcaccggacgtacggttccgtatccggcgctacgtttgtgattatttacgagataaataatattctagcggatcgaccaagcctgggcgatccgctttgcttatgcccaatacttttgggctaagcagaaagttaatgacatgacccgtacttcttttataccaacctaagcgcgtattagctactttatgaatatcttcatcactaaaattgcactttagtgccttgttaatccgcattaagttaatgtatattcgttttggtagtttccattgtttaatgattaccacccgtactttatgacgcagccattgactgaacttaattagaaaatatttcatgtcgccaactctaaagtaattgacccagcctctaactacttgatttatcttagtaaagactagtgatagaggctgagcagctgcttttctgcgacagagaagttctctcatcttgtcataaagcttgattttgcggtcatctcctggctttgcttgccagtattcgccacttttccagaaggtaaagccaagaaagttgctcttggttggtcgtacaactttggttttggttgcgttgacctttaggaatagctttctttctagccatgatgaaattgaattcatcacacgtttggctgatttaccgcttttgacaaagatattgcagtcatcggcatagcggacaaagcgcaggcctctttgttccaattctttatccattttatctaaatagatattggatagaattggtgaaagagggccgccttgtggtacacctagtttattaggcttaacccaaccatcttccattactccagctttaagaaaggctcgaattaaatggagggtggttttgtcatttacttgctctctaattattgaaattaatttatcatgatttaccgtgtcaaagtatttctcaatatccaggtcaacaacccattgatagccttcgtttaaatattccaagacttgttcaatagcgtcatgagcactgcgtccaggtctaaagccatagctatgctcactaaaatgaggatcatagatcttcattaatacttgggcaatagcctgctggattactcggtcaacaaccgtgggtattcctaaaggacgtttcttaccattagctttaggaatgtagactctgcgaacagcttgcggacgatacttcatcttcatgatggcgtcctttatttctacttgatgctttttaaaatagctatcaagctcatcaactgttctcctgtctacaccaggcgctcccttattgattttgactctcctgattgcttccttgagattattttgacttaaaatctgttcaattagttccatctcgtgatatctccatttctacttgtaaatttattcagaattgtcccaattgctttcaccatcaaagagttacgttctctttgtgctaggctatcctcttatccggactgtctgaacattgcttatagcgagatatgctcttacaaacattaggcccttcgctccagtttcattacaaaaccttcagcactactacgacctcagctgacttctcgcgattaacctttttcgaccaggcttacgatcgctgatattaaagcttactcggtttcacctgtccacgagatctctcggggtaagacattcatctttaattttccactgccccctggtttaccgtcttggttttacggttgtcctttggactttaacttgtgctgcagtctcatccaccatttggcctgaccaggtttctgtacgtaggctcggaaaactcgctagccacttccttcacccatagcgtcaccgctaacggcttgtggttcgctacacttggcgacaactacccgtgatctagactttcactagactagacaaatgccatgcccgacacacaacaaaaagcagtttctaaaaagaaactgcttaagtattattattttcaataattaccatttaatgttagaaatagaagatcaaaagtagagaatgaaaatgtaaaagtaggagtagagaataaaaatgagaaaaaagggctggctctttctaacagccagtcagagtactcaaatctgagacaaaatgtaaaaattagcatagatcgattaacaattgttggagatttttcgacagagctttttaaaaaattagttcgtaaatggctgactttttcttttattagatcttcgggagctggttttgaggtattagattattcaaattgcaggtttgatgatttcggtaatccacatgaggaaattccgcctgggcttttaaaacgtgctgttttttcttgccggaataataagctgcttgtctttttttgggcgttgaatctttacttcagtggcatcgattaagacaacatcgtctggcttgatttcttgcttgccaatgttaaagccatgcttagccaaagtctcttcggcccagtggcttcttctgatcaggttgctgtcatgcacaccgtaatcggcagctatttgttcataagtacggtattccttgaggtactgcaaagtagccagaagcaggtcttcaattgccagcttgagctttctgccgcctcgggcatgcttgacttgatattcggcttttaatactttgaccatttcgtcaaagacaggcttggcaacgccgatcagacgcttgaatctggtattgtttaaatttttagctgtttcgtatttcataatttaagattatagcagatgtttcgcagtaactctattaactaaagaaacaaataatgaaaggcatggttggctttggaaaataacgcattagctaataacgtcaaaatacgctgaactgagtttgtcgaaataccggtgagactggcgatagtcttagccgggagtgatttactggctagcttcagcacatgagtcgctagtccgtgaccgatggcgtggttggttgataccactggagtggtggccgtacaagtgctatggcagttactacaacgccagcgttgcttgtttagctctagaattacgggccggtccatggatcctgcaatgtggacatgagtgagcttgtgtccgttagggtgcaacatattgtatccacagctgggacagcgcctgagtgtgtaggtaagctctgcctggatgaccaaatactttttgcgacccgagccccgaccatgaaattcctcacgagtaccgaacacccgaatgtttgtgtctgtaactcccagtaatttaagtgtattatctagttgagacatctattcctacccccgcttatcttgagtttcgtcgcttaaagcatagcactagggaggcttagatgcctttttttgttatcaaaaagggcctagtacttttggaatggaaatactttccaacaccaaaaattctagacccctaaatttgcgatctaccacgtatgtttaaatcaaatttattttaaatataccttgtacagtgaagtttattgattgtgtgatttatgataaaagattaatcttttatcataaatcacacaatcagtaatacataagttaagctcaatcttatttacgtttggcaaggccttcacgaataattttttctaagacatcaacaatttttttgtcattctcaaaagcgatgcgtttaacttctttatatgtgctcatgcgaagttgaacggttttagttctttctgtttcgaattggtatggactttttagatttttaagttgttcagatgcctttttactaactttgtttaaaaaatcttctgccatgataaattactcctctaactgttgaattctaagtagttgttcattaagaaccatttggtacatttggattgctcttttatcccaatggtctttattccgtattccttcattagcaaacgttttaacccgttcttgagttctaattgagtttgaaaagaccccttcgccaaaaaagtcttttgcttgtgcagaaatttcagtatcaacttttgcacgtggcttcattaagtacaatatgacaccaactaactgaaaacttccattgtattgttcacgtagttcacctaaatgcgtagctgtttttaaagaacttgtatatgactgcttttgagtttgtaagacaattgagatgaaatctgaagccatgattgcgttattagtaaagacatttattgttggtggtacgtcaataaaaatataatcgtaattttgttttaattttgaaagcatttgtggtaatagaatattacgtttaacccgactaactttttctacagcaccaatccataaagacaatgtccaatctgtaggaatcatatcaatttggtttgtaacagacacaatagatttagacaaattccctccaagaaggccctcatataatgaaagttccggctttaaatcggctttataagtctccttcataatttcagttgcatttccctggggatcgaaatctatcagtagtacttttttcccctcttgacccaataaataggtttccattacagtcaaggtggtcttaccaacgccacctttaaagttgaagtttaatagtgttttcccattcatagtagcacctacctttacataaacattttaccatgatttatgattaatcgcaaattttatatgatttatgattaatcataaatcatatccataaaaatatttacttaacctttgcagaatgatatgctttgttcataaacaaaaaatcccaatacactcgggattgggatttttgcagtattgacaagtagctatcttgcagctacctagtccaagcaattttcaccgccgagttaaaattgcttgaacaaattgtaatcttgtttacgtgctaattataccgcaagcaaaccttaaagggcaagcaaaggtaaactaattaaaacgaagacaagaccaatggactaagtagcttctaataactacttagtccatttttagttcttaaaaattaaaaaagttgccgactgggcaacccagaatagacacatgctggtgaaactacaaagccgatcacgaccaatatccgctttgtaattctattaaagcatatcagatttgtattttaaagcaagtcagatgttttagcaactctcttttgagacagcgtgtgtcagtcaagaaagggagtttttattatgacaaaatcaacaaatttcaattactatgaagccgataacgtatatggagccttatttttccagtttcctaaggtattaatgtatggcgagcaatataaacatttaagcagtgatgctaaattggcttatatggtactgaaagaccggctcgagtattctttacgcaacaactgggttgatgagcaagggcacgtctactttatttttaccgttaaagaattacaagatttatttaactgcgctactgaaaaagccgttaaaatcaaaaaagaattgcaaacagccaatctattaaaacaaattcaaatgggatttaatcctaaaactaaaaagaatgaaccaaatcgtctatacctttctaaactcgatgtgaaagctactgatgtctatttaaggggcgaatatgggcaaaaaaagccggaatcccttactacgagcggaatttcgaaaatcgaaagtccgcatgacttcgttgaatcccttgctacgagcggaatttcgaaaatcgaaagtccgcatgacttcgttgacgacaaccctcaaacccttgctacgagcggaatttcgaaaatcgaaagcaatctatataaagactataaaaataatatagatactaatagatacggtatagatactcaaaagttggacttttccacaactaatttttcaccagctgaaattgaagcccaaaatcgagatctagtaaaacatgctgatgagttcttaactgacgaagataatgggttgccggtcttcttagaaccagaagcagttcaactacttagcttttggtgccgtaccccacaacaaatgcggcgctttattggcattatcttaaacgccaaatatgctgttgaaaaagagcataaggatttaggcgtatggattctattagacgatcctgatttaaaaaaaatgatgaccaaaacattaagacgctattttaatgctctaagaagcgacgagaagcatatcaagaatgttgagaactacctgtacggcaccatgcaaaacctatttggtgtttggtggaaccgacaagcagctagagaatatgcggccaaacaccccgaagaacagaatcttgatggcgagcgcgcttgggactaaaacgccatataagcccatttaagccacttcaagtgttacgcatatattttactaaagccactttaaaatcgcttagaagtaaaaacagataccttgagtgggcgaattggcgatagctaaacagaaaaatgggataggcgctttttaaatgaccaaaccaagcaaagaagttgaaaaaaattgagcaattgttggctgacccatgggcagtcgatattcaagacatttgggagcaagcagcccaaaatcgagatcctgataaatgcaagctgtttgacgcgttatacacttacctcttagataaacgccaagaacaaatcatcaatgaaaagcactttttgatttaacatagacagttcaaataatcaatgattgaaataaaaaggaggcacaaaatatggctaagacacgaacatatatggacaagtatagattcacaactgcggaaaaccaacggtttgcccgagcaaattttaccaagttagtgcatactaatgctcgctttgaaggcgttaataccacattgccacaaacacaaactattatggacggtatgagcgtagcaggagtacctgttgaagatgttttgacgattgttaatttaaagcgtgggtggcaatatatcactactcaaaattcccctttaacgttaaccatggaaaaacaaatcaacaaaattgtggcagcagaagacgccttagtaccaggagaattacggcaagggaaagggggagttaatttaggtagtgaagacttttttgagccgcctttaattaacgaaaaacaggaacaatcctttttacaaaaaatcttgactgatccacgaacgacgattactgataaagcattgactgtcatgtatcataatatgcgtcaacaaatcttttgggacggaaacaaaaggacggcaactttaagtgccaataaaattatgattgacggtggcgctggtttaattaatatcccattagataagtgggatcaatggaacgaactaattgccaattattatcggactaatgacatgactgaagttaaaaagtggacatatgataatggtatccaaggattacaaattcgagcaaacaaaaaattaagtgctaatgaattgaaccagatgtacaagcaactaaaaaaacggataaattagaacttaaattagttcctgaattgtcaatttaagtgcaacagttaggttatgaagagatatattgcttgaagagttcttctgctgtgtgatattggaggattcggcgatgtttgtggttaatggcattagttgcctgttgaacatatgcagctgtcttatcgttcatgcttttgcctttagggaagaattgacgcagaagaccgttgcagttttcatttgtgcctctttcccaaggtgaatatggatgagcgaagtagatctgacagtttttaattttagtcatatctgcaaactcagaaccattatcaaaagtaatagtcttgaaccaatctggatgctggtctatttctttttgaagcagtctttgacaagtacttgctcgataatctggtattttgatgacaatttcaaaacgagtagttctttctgtcagagtcatcaaagcaggctgatttttacgtctaacgcctttaacccaatctccttcccagtgaagaggagttgctctgtcttcaacttctttaggacgctgctcaattgaattgccaagattctttttatgcaaagcatgcccaccatgactatgatgccgtttgtttctgcgtcttttaagcttcattggcagatcaatattgcttatatctagcaaaccgcgatcaatatagcgataaacggtaggcgtgctggggcaaggatagcctggcatcgtctgcttgaactcacccacaaactcatcaatgctggtagcatcaaatttagttttaaaccgcttagacagcattttcagaaaaacagcataatgctttaactgatcacgcttatagcagttcttgcgtcgcttatcatgatagatctgcgcagtatcggcatagtaatgctcatagagcagatagttatgatctctttgcaggacgctgccacgtctgatttcacggctaattgtcgatttgtgacagccaacttctcgagcaatagcggaacaggaggttatgcctaaatcaagcagagcttgtatttgtcctcgttgtacactatttaattgatgataatgtctagagatgctagaatttgaattggtcatgaagattcaccttccttgatttttcgtcacttcaagtttaggtcttcatggcctttttgtttaacacttagcgttgcacttcaattttaaatccgggacttaccatttctgttagaattgcaacttgttctttggtaaatcgctgttgttttctaatatcacttaaatcttttgtccacttagaatttttttcattttcttctgctaacttcataagatgatgaattacttcagcattattttttaaatcgtgttcctctttataatcttgaatccaatctaaatctgtatcagaaattgtcgctctaaaagttgtcttaatcattttttctggtcctcttaatcagcgtaagtttcttgtctttttttcaaagcattatcaatcttttgattaattttttgtaactcttccagttctttttctttttgaacacctaacatggcattgaagaataagaacttataaagttgaccattattatcaaagcaatgttcttttctaatctgcctaatttcttcccattgcttatcgttgagtcgaaattgcaaaaagtgctgtcgtcccatttcttgccctctttctaaatttaatcatcttcttttgccgtgtcttctgacaaactatctaacaaatttaatgctcgttcggtgtcattaacatctccactaatgaaatactttgcaagaacattcagccctaataaattttcctgcagaagtttattctgcttctgaatcaataaactagtttgcgaatcttcattttgattttgaaaattaattggaatttgttcaatttgttctctcaaaaattgatttctggaaattttcttacttgaattttgatttaattgattaacaatccgatcaattctagccaagttttgttcgctgattccacggattaaaacttttaccataatttttctttcctctgatttctagtttctagttttccttctagtttctactctgaaatttgactaaaatctgcttcttttagttatctctagtaaagagcataagggaaatctgaccccacgccttttatcaaggtgtgctgggcttggttgtaccaagcgatttcgcatttttagaagtgatatcacttctgattaatttgacgtctatatacttctaaattgttcgtcttttacctgacattacgtcttgatacgtaatgtttttttgtaatatccgaacaggacgtattcttacgtagctcattacgtccaagacgtaacattttttgctctatttttgagtctagttatcaaaatttctattttttaactctaaaatttcttcaacattttcaaccaaaattcctaaagtcgacgcaatttctcttgtgcttttgccaatttcccgatattttttaactcgaaaaattaactcttgagaatattctacaggttccttatcacgctctatctctttaacttcaacatttctagcatgatacctctgcatcattttttgcaaagttccttcaagaatatcaaactgatttacaaattctttcgctaaaattttagaaaccctatttgactttttagcttcataaatcatttttctatatctctgcttagaagcccgagaagctttactatagaattcaggattatgaaccaacgcataaatcatcatttgcctatttaaattttcctcatggtcccaatctggcaaataaaagttttccagcatttctctaacttcctgaacataattttcaatttttgaaccacgcaactgcatttctaatcgccaaagtgaatcaacatttacaattcgtccatgcctttgttcttgttcaatttttttattatacaaacgaatttgtctctcacttgaacgcgcgccgaaatataccgtttgcaattccccattcttaccatagaaaaactttttagtcattccccagcgccatacctgataatactgaatctcagaatcattataaatatcaaaagctacatcacaacgtgaataatgcttattttgaatttttgcaataatttctctaagtagccattgaccagctggagtattcatcgaatgattgggattaaagtcaattctaatcttatctttttgaaacctaggaacttcaaaatatgcaacttgcccaggcgattacagacattaccggcagaattattcatttagacagctgccaggcataccggcatgacatgcggctgctgcgtgattagctgatatattataatttttccaattattgtaaatatcaattttatcttgtttggataatttagacataaataaaaaccccgaaattcttgtccgaatttcggggttcatatcaataaacactttagctgcttttctattattaaactaaatcatacatttctggcattctgcaccattttgaattaaacattcgtctgcagtcaagttctcactaccagctaaaactttttctcttattctaacataataaattgagttgcagcgctttttaaaggcataaatataagccttatttaaatctcttgttgttgcattatcttcaacaaataaagttaacgaaattgattgatcaacatacttttgtgcagcagctgtaatatcaataatagcattaggtcctacttcatatgcacccttttcgtaatactcataattgtctttattaatcttataagctggtacataaattcgacccaaatcagcctctttgcgtgtttcaacaggagctactactggctgcaaacttggtgtacatgaagataaataactaattgatccagtaggtgcaactgctaacaagttagcattagctatacctgtctttttaattttagtaatcaattcttcccaatcttctttagttggaataactaatttatatttagctacaatttctttaatcttgtctgttttcggtgagacttcctcatcaataaattttttgaaataatcaccactagcatatgatgaatctttgaatcctttaaaagcaccatacttttcagctaatttatttgattctttaaatgcatggtatgcaattgtataaaagaaaattcctgtaaattcaactgcttctggtgaatcataataaatatgattagttgctaaaaagccatgtaaattcattgctcctagaccgattgctcgattagctttatttcccttttcaattgaaggagcacaatctaaatctgaagacctggcaacacgattaagcgcttgaacactatcagaaaccaaaccacctaacttgtcagcgctattcattgctgctgcaatattaagtgatcctaaattacaacaaacatcgtagcccgtcttattaaaacttaagtcttcattataggtacttggcgtattaacctgagcaatttctgaacataaattagacatcacgatccgccccaatttcttttgtgggtttcttcgattgacagtatcttcatacataatatagggataccctgattcaaattgaacttcagcaatagtttggaagaattttctagcactgataaatgtctttttaatacatggattattaaggagattttggtattctttagtaattgaaatatctgacattggtttaccatattcacgtttaatatcatatggtgaaaacaaagccatctttttattttctttggctagttcaaaagtaatatctggaatcactacgccaagtgataaagatttaattcttaccttttcgtcagcgttttctcgtttagtatctaaaaattgcagaatctggggatgatgggcacttaaataaactgcaccggcaccttgtctttgccctaattgattggcataagaaaatgaatcttctagtaatttcattacaggaattatcccactagataaattcttcatttttttaataggtgcacctaattcacgcaaattagttaagcatagagcaacaccaccaccacgtttagataattgcagacttgtgcttattgctcgtgaaattgattccatattgtcttcaactctgagcaaataacatgaaacatattcaccgcgtctctttttacctgcattcaagaaagtcggagttgctggctggaaacgattactaataatatctttaactaaattcaaggccagttcttcattgccatcagctaaaaataaagcattcataacagcccgatcttcaaaacgttctaaaaattgtttattatcgtttgtttttaaggcatatgctttatagaatttagctgcacccataaagttcaaaaagctaaaattttgcgcataagctaatttgaaaatttctttaataaatttagctgtatataaatctagaacttttttatcatagtaattattatcaactaaataagctaatttttcttctaaagaagcaaactttttcattcttggttcaatatgattttcaagatattgcttagtagcttccttgtcagctttaaaattataatttcctttttcatctttaaatttagcaagtgcatttaaagaaatatatgaatcattattaagatgatcagtcattgtcctcacctgcatcagcaattattttattaacattatttacatcttcagttgttcccagtaactcaaatttatatagataaggaacatgtaatttcttagaaattacatcccctgccaaggcaaaagaattaccaaaattggtatttccactagcaataacaccaatacatttttgccgattagccaatttgttcaaaaagtggataacttgctcaggcacagcacctgtagtcccatggccaccagaataagttggcgtaattaaaatatattcttcagaaactgaaatttctttactgagtttaataggaatcctaatagaattacaatctaacttttctacaaagcgtgctgtattatttgaagtggaagaataatagacaactaatggctttttagaaatcccagtcatcatctttagtctcctctcctgttcccattacatatgaagaaccattaccagaaaagaaatcatggttttcatcagcttgagctgataattgagcgaatacttctggggaaatataagtttcttctgcggtaaaaggagtatcatagcctaaattttgtaaaaatttacctgcattatacaaactgaaatgaattgcatcatcaaccaaatcaaaatcatcataaagctcgtgcaaatatttcttttccaaatcaattagtttatctaagaaatcaaaaacgaattttttcatttctgcttgtttagctggagctaatttctttacggccaattgatatttgtaaccactataataattgtgaataaccttatctcttaagatcaatctaataatatcagcagtattaggcaatttacctcttgcagctaaataaaatggtaaataaaaaccaccataaagcaggaaccctggcataattgctgcggcaacctttgatttaagcggatcattgcctgtataatacggaattaccgctttagctcttgcttgtaaagcatcattattaactacccattcatgcgcttcttcaatttgttcactagtacataaagtagaaaaaatagttccatatgatcttgcatggacagcaaccataaaagcaaaatttgcatagatagcttgctctatatcagtttgtgaatttttaatttgggctacatcacccacacttgattgagttgtatctaataaagtcaatccagtgaaagtgcgagttataagctgttgccagtcatcagataattgattccaagaacttatatcattcgaaactgggattttttcaggtaaccaaaagttttgagtaactctgttccaaacctcaagatccttatcatctttaatgtcattccagttaatagctcgcatatttttgccgttgttattgtaagcaaattcaactggtgactgtgaatgatcataataactcatatttgtatttgctcctatcattatttattgttttacgcgtggtgctagttaaatcgttttagttaataaaaaagtccaatcttgttagactcaacttgtataataatagaaaagagcctgatctgattgaactgccttaagcttaagcgttttagccaccatttacaagttagttttaaagatttagtgataatttgtcggcactggtatcgtttgtatgcaccggctgagtttactcatcggcgaaatattgatcaaattaaaactacggacagtctgattttggctttacttatctggcaagctaagacaggaattgaatcacaaagaagattctgtgaatgtttcaattgtttatcacactcacgttttaatcggcgttcacgtcagctattgcaattgatttatcagatacggcaagaaatgaataaaaaggttgacctgaatggacatttcttgatcattgacagctttccggtacctgtttgccaaccaattcgcaactatcgtgctaaaatttttcgcggttatgccaacattggttataaggccaccaagaaaatttacttctatggtttcaaagttcatgccattgttagcgatgacggttacattcttgattatgtcgtaacaaaagcatcagttcatgatgccaaggagacagttgaactgctggaaaatgcccatccatctaattactatcttcttggcgacgaaggctatttaggcaaagaactgcatcaacagctaaaacaaatgggttatgaactttggacaccatatcgtaaaaatatgacaggagctaaaaagcacaatgatcatcaattgatggctattcgcagaacaattgaaagcgacttttcgcttctgacctattacaatgccgagaacaatcgagcacgtagtctgataggctttcaaagccggttggaaattgtaattttagcttataatttggcttattgtctagaacgatttaactagcaccacgcgtattgttttatctaatatttgtgtgaacataatatagcatcttctgctcaataatacaacatgtggatttttggctatttataatcaatatattgtggctaagccgttttgataatacaaaattattttcaaatttattttatcttccaaaaataatgtaggtgttgttttttgcttttttgacaaaaaaatctccctgaattgtcaaattaagtgcaacagttaggctatgaagagatatactgcttgaagagttcttctgctgatagcgctgaaatttcaaatagaattaataccgataacgatcaggatcaggatcagcaaggtgataatgcggaaacaaattttgaatattccgatgatcgtgatggagatgaccaataaataattaaaaaaaggagtagacaaaatagcattaagtcagaaattagctttgaataatgattttcaaaacaaaaaagccctgctattatgcagagccaccgcgcgttcgcaagttatcgtcttgctgcgcatgcatccatgatcattggacgcgacaattttcctacatgtattataacatgctaaaataaaaatgcatgtcattcatgcacattctagggttggctcaatcaaccaccctataggaggtgagagacgttggacgacatgacaattttcctaatttgcgttctgctacatgagctccatttagttcttcgggaactaaataatctacttgataagtagtcatcattagtagacgcgaccagagtcatcggcagttgtatagtcggtgacttttttattttgcattctttaattctctaaagcgtcgataaattggtgttttggagatccctaatttcttgctgatttcagaatagctcctgtatgcaacctccaggcaaaatcaatttgttctggagtgtactttcgaagcataccatcatggaggttggtattattagctttcgctcatgccttgttttcccaagatgaaaaagtgcgacagatcaacgcttttttatttttttggtcaaattttagaaatatgctaaataaaaaaagcggtcaaacgaccgcccacgttttgcatgcctcgttcatgtcgacagcataacactaatcctttaatcattataacatgataaaatagttatggcatgcttttgtgcccctacactgctgtaaaaggctagaaaggagctgtatcatgtcagatgttgtaacactaatcctaacaatcgcacttttgaatgaattacatttagtccttcacgaactaaaccagctattaaagcactagtgcaaaaagtcgtccttcggggcggcttttttgtctcttaactctctaaaacgccggtagatagttgcttttgacatacctaatttccga
